(19) United States
(12) Patent Application Publication
(10) Pub. No.: US 2020/0115688 A1
(43) Pub. Date: Apr. 16, 2020

(54) COMPOSITIONS AND METHODS FOR ENHANCING GENOME EDITING

(71) Applicant: The Regents of the University of California, Oakland, CA (US)

(72) Inventors: Jennifer A. Doudna, Berkeley, CA (US); Brett T. Staahl, San Francisco, CA (US); Jennifer Sabo, Berkeley, CA (US)

(21) Appl. No.: 16/628,114

(22) PCT Filed: Jul. 31, 2018
(86) PCT No.: PCT/US18/44678

§ 371 Date: Jan. 2, 2020

Related U.S. Application Data
(60) Provisional application No. 62/545,672, filed on Aug. 15, 2017.

(51) Int. Cl. C12N 9/22; C12N 15/90; A61K 47/18

(52) U.S. Cl. CPC C12N 9/22; A61K 47/18; C12N 15/90

(57) ABSTRACT

The present disclosure provides a composition comprising an RNA-guided endonuclease and an agent that decreases the acidity of an endosome. The present disclosure provides a composition comprising: a) a ribonucleoprotein (RNP) complex comprising: i) an RNA-guided endonuclease; and ii) a guide RNA comprising a segment that binds to the RNA-guided endonuclease and a segment that binds to a target nucleic acid; and b) an agent that decreases the acidity of an endosome. The present disclosure provides methods of binding a target nucleic acid in a eukaryotic cell; and methods of genetically modifying a target eukaryotic cell.

### CROSS-REFERENCE

[0001] This application claims the benefit of U.S. Provisional Patent Application No. 62/545,672, filed Aug. 15, 2017, which application is incorporated herein by reference in its entirety.

### INCORPORATION BY REFERENCE OF SEQUENCE LISTING PROVIDED AS A TEXT FILE

[0002] A Sequence Listing is provided herewith as a text file, “BERK-352WO_SEQ_LISTING_ST25.txt” created on Jul. 31, 2018 and having a size of 8,027 KB. The contents of the text file are incorporated by reference herein in their entirety.

### INTRODUCTION

[0003] RNA-mediated adaptive immune systems in bacteria and archaea rely on Clustered Regularly Interspaced Short Palindromic Repeat (CRISPR) genomic loci and CRISPR-associated (Cas) proteins that function together to provide protection from invading viruses and plasmids. In Type II CRISPR-Cas systems, the Cas9 protein functions as an RNA-guided endonuclease that uses a dual-guide RNA consisting of crRNA and trans-activating crRNA (tracrRNA) for target recognition and cleavage by a mechanism involving two nuclease active sites that together generate double-stranded DNA breaks (DSBs).

[0004] RNA-programmed Cas9 has proven to be a versatile tool for genome engineering in multiple cell types and organisms. Guided by a dual-RNA complex or a chimeric single-guide RNA, Cas9 (or variants of Cas9 such as nickase variants) can generate site-specific DSBs or single-stranded breaks (SSBs) within target nucleic acids. Target nucleic acids can include double-stranded DNA (dsDNA) and single-stranded DNA (ssDNA) as well as RNA. When cleavage of a target nucleic acid occurs within a cell (e.g., a eukaryotic cell), the break in the target nucleic acid can be repaired by non-homologous end joining (NHEJ) or homology directed repair (HDR).

[0005] CRISPR/Cas systems provide a means for modifying genomic information. In addition, catalytically inactive Cas polypeptides, alone or fused to transcriptional activator or repressor domains, can be used to alter transcription levels at sites within target nucleic acids by binding to the target site without cleavage.

### SUMMARY

[0006] The present disclosure provides a composition comprising an RNA-guided endonuclease and an agent that decreases the acidity of an endosome. The present disclosure provides a composition comprising: a) a ribonucleoprotein (RNP) complex comprising: i) an RNA-guided endonuclease; and ii) a guide RNA comprising a segment that binds to the RNA-guided endonuclease and a segment that binds to a target nucleic acid; and b) an agent that decreases the acidity of an endosome. The present disclosure provides methods of binding a target nucleic acid in a eukaryotic cell; and methods of genetically modifying a target eukaryotic cell.

### BRIEF DESCRIPTION OF THE DRAWINGS

[0007] FIG. 1 depicts the effect of bafilomycin A1 on editing efficiency of 4×NLS-Cas9-2×NLS and 0×NLS-Cas9-2×NLS.

[0008] FIG. 2A-2G depict amino acid sequences of polypeptides that facilitate crossing a eukaryotic cell membrane.

[0009] FIG. 3A-3J depict amino acid sequences of various RNA-guided endonucleases.

### DEFINITIONS

[0010] By “site-directed modifying polypeptide” or “site-directed DNA modifying polypeptide” or “site-directed target nucleic acid modifying polypeptide” or “RNA-binding site-directed polypeptide” or “RNA-binding site-directed modifying polypeptide” or “site-directed polypeptide” it is meant a polypeptide that binds a guide RNA and is targeted to a specific DNA sequence by the guide RNA. A site-directed modifying polypeptide can be class 2 CRISPR/Cas protein (e.g., a type II CRISPR/Cas protein, a type V CRISPR/Cas protein, a type VI CRISPR/Cas protein). An example of a type II CRISPR/Cas protein is a Cas9 protein (“Cas9 polypeptide”). Examples of type V CRISPR/Cas proteins are Cpf1, C2c1, and C2c3. An example of a type II CRISPR/Cas protein is a C2c2 protein. Class 2 CRISPR/Cas proteins (e.g., Cas9, Cpf1, C2c1, C2c2, and C2c3) as described herein are targeted to a specific DNA sequence by the RNA (a guide RNA) to which it is bound. The guide RNA comprises a sequence that is complementary to a target sequence within the target DNA, thus targeting the bound CRISPR/Cas protein to a specific location within the target DNA (the target sequence). For example, a Cpf1 polypeptide as described herein is targeted to a specific DNA sequence by the RNA (a guide RNA) to which it is bound. The guide RNA comprises a sequence that is complementary to a target sequence within the target DNA, thus targeting the bound Cpf1 protein to a specific location within the target DNA (the target sequence).

[0011] “Heterologous,” as used herein, means a nucleotide or polypeptide sequence that is not found in the native nucleic acid or protein, respectively. For example, a fusion Cas9 polypeptide can comprise: a) a Cas9 polypeptide; and b) a heterologous polypeptide comprising an amino acid sequence from a protein other than the Cas9 polypeptide.

[0012] The terms “polynucleotide” and “nucleic acid,” used interchangeably herein, refer to a polymeric form of nucleotides of any length, either ribonucleotides or deoxynucleotides. Thus, this term includes, but is not limited to, single-, double-, or multi-stranded DNA or RNA, genomic DNA, cDNA, DNA-RNA hybrids, or a polymer comprising purine and pyrimidine bases or other natural, chemically or biochemically modified, non-natural, or derivatized nucleotide bases. The terms “polynucleotide” and “nucleic acid” should be understood to include, as applicable to the embodiment being described, single-stranded (such as sense or antisense) and double-stranded polynucleotides.

[0013] The term “naturally-occurring” as used herein as applied to a nucleic acid, a cell, or an organism, refers to a nucleic acid, cell, or organism that is found in nature. For example, a polypeptide or polynucleotide sequence that is present in an organism (including viruses) that can be isolated from a source in nature and which has not been intentionally modified by a human in the laboratory is naturally occurring.

[0014] As used herein, the term “isolated” is meant to describe a polynucleotide, a polypeptide, or a cell that is in an environment different from that in which the polynucleotide, the polypeptide, or the cell naturally occurs, or from that in which the polynucleotide or polypeptide is produced. An isolated genetically modified host cell may be present in a mixed population of genetically modified host cells. An isolated polynucleotide or polypeptide can be purified, e.g., separated from the environment in which it naturally occurs or in which it is produced, resulting in a polynucleotide or polypeptide that is at least 50%, at least 60%, at least 70%, at least 80%, at least 90%, at least 95%, at least 98%, at least 99%, or greater than 99% pure.

[0015] As used herein, the term “exogenous nucleic acid” refers to a nucleic acid that is not normally or naturally found in and/or produced by a given bacterium, organism, or cell in nature. As used herein, the term “endogenous nucleic acid” refers to a nucleic acid that is normally found in and/or produced by a given bacterium, organism, or cell in nature. An “endogenous nucleic acid” is also referred to as a “native nucleic acid” or a nucleic acid that is “native” to a given bacterium, organism, or cell.

[0016] “Recombinant,” as used herein, means that a particular nucleic acid (DNA or RNA) is the product of various combinations of cloning, restriction, and/or ligation steps resulting in a construct having a structural coding or non-coding sequence distinguishable from endogenous nucleic acids found in natural systems. Generally, DNA sequences encoding the structural coding sequence can be assembled from cDNA fragments and short oligonucleotide linkers, or from a series of synthetic oligonucleotides, to provide a synthetic nucleic acid which is capable of being expressed from a recombinant transcriptional unit contained in a cell or in a cell-free transcription and translation system. Such sequences can be provided in the form of an open reading frame uninterrupted by internal non-translated sequences, or introns, which are typically present in eukaryotic genes. Genomic DNA comprising the relevant sequences can also be used in the formation of a recombinant gene or transcriptional unit. Sequences of non-translated DNA may be present 5′ or 3′ from the open reading frame, where such sequences do not interfere with manipulation or expression of the coding regions, and may indeed act to modulate production of a desired product by various mechanisms (see “DNA regulatory sequences”, below).

[0017] Thus, e.g., the term “recombinant” polynucleotide or “recombinant” nucleic acid refers to one which is not naturally occurring, e.g., is made by the artificial combination of two otherwise separated segments of sequence through human intervention. This artificial combination is often accomplished by either chemical synthesis means, or by the artificial manipulation of isolated segments of nucleic acids, e.g., by genetic engineering techniques. Such can be done to replace a codon with a redundant codon encoding the same or a conservative amino acid, while typically introducing or removing a sequence recognition site. It can also be performed to join together nucleic acid segments of desired functions to generate a desired combination of functions. This artificial combination is often accomplished by either chemical synthesis means, or by the artificial manipulation of isolated segments of nucleic acids, e.g., by genetic engineering techniques.

[0018] Similarly, the term “recombinant” polypeptide refers to a polypeptide which is not naturally occurring, e.g., is made by the artificial combination of two otherwise separated segments of amino sequence through human intervention. Thus, e.g., a polypeptide that comprises a heterologous amino acid sequence is recombinant.

[0019] By “construct” or “vector” is meant a recombinant nucleic acid, generally recombinant DNA, which has been generated for the purpose of the expression and/or propagation of a specific nucleotide sequence(s), or is to be used in the construction of other recombinant nucleotide sequences.

[0020] The terms “DNA regulatory sequences,” “control elements,” and “regulatory elements,” used interchangeably herein, refer to transcriptional and translational control sequences, such as promoters, enhancers, polyadenylation signals, terminators, protein degradation signals, and the like, that provide for and/or regulate expression of a coding sequence and/or production of an encoded polypeptide in a host cell.

[0021] The term “genetic modification” as used herein refers to a permanent or transient genetic change induced in a cell following introduction of new nucleic acid (e.g., a DNA exogenous to the cell). Genetic change (“modification”) can be accomplished either by incorporation of the new DNA into the genome of the host cell, or by transient or stable maintenance of the new DNA as an episomal element. Where the cell is a eukaryotic cell, a permanent genetic change is generally achieved by introduction of the DNA into the genome of the cell. In prokaryotic cells, permanent changes can be introduced into the chromosome or via extrachromosomal elements such as plasmids and expression vectors, which may contain one or more selectable markers to aid in their maintenance in the recombinant host cell.

[0022] “Operably linked” refers to a juxtaposition wherein the components so described are in a relationship permitting them to function in their intended manner. For instance, a promoter is operably linked to a coding sequence if the promoter affects its transcription or expression. As used herein, the terms “heterologous promoter” and “heterologous control regions” refer to promoters and other control regions that are not normally associated with a particular nucleic acid in nature. For example, a “transcriptional control region heterologous to a coding region” is a transcriptional control region that is not normally associated with the coding region in nature.

[0023] A “host cell,” as used herein, denotes an in vivo or in vitro eukaryotic cell, a prokaryotic cell, or a cell from a multicellular organism (e.g., a cell line) cultured as a unicellular entity, which eukaryotic or prokaryotic cells can be, or have been, used as recipients for a nucleic acid (e.g., an expression vector that comprises a nucleotide sequence encoding an RNA-guided endonuclease), and include the progeny of the original cell which has been genetically modified by the nucleic acid. It is understood that the progeny of a single cell may not necessarily be completely identical in morphology or in genomic or total DNA complement as the original parent, due to natural, accidental, or deliberate mutation. A “recombinant host cell” (also referred to as a “genetically modified host cell”) is a host cell into which has been introduced a heterologous nucleic acid, e.g., an expression vector. For example, a recombinant prokaryotic host cell is a genetically modified prokaryotic host cell (e.g., a bacterium), by virtue of introduction into a suitable prokaryotic host cell of a heterologous nucleic acid, e.g., an exogenous nucleic acid that is foreign to (not normally found in nature in) the prokaryotic host cell, or a recombinant nucleic acid that is not normally found in the prokaryotic host cell; and a recombinant eukaryotic host cell is a genetically modified eukaryotic host cell, by virtue of introduction into a suitable eukaryotic host cell of a heterologous nucleic acid, e.g., an exogenous nucleic acid that is foreign to the eukaryotic host cell, or a recombinant nucleic acid that is not normally found in the eukaryotic host cell.

[0024] The term “conservative amino acid substitution” refers to the interchangeability in proteins of amino acid residues having similar side chains. For example, a group of amino acids having aliphatic side chains consists of glycine, alanine, valine, leucine, and isoleucine; a group of amino acids having aliphatic-hydroxyl side chains consists of serine and threonine; a group of amino acids having amide-containing side chains consists of asparagine and glutamine; a group of amino acids having aromatic side chains consists of phenylalanine, tyrosine, and tryptophan; a group of amino acids having basic side chains consists of lysine, arginine, and histidine; and a group of amino acids having sulfur-containing side chains consists of cysteine and methionine. Exemplary conservative amino acid substitution groups are: valine-leucine-isoleucine, phenylalanine-tyrosine, lysine-arginine, alanine-valine, and asparagine-glutamine.

[0025] A polynucleotide or polypeptide has a certain percent “sequence identity” to another polynucleotide or polypeptide, meaning that, when aligned, that percentage of bases or amino acids are the same, and in the same relative position, when comparing the two sequences. Sequence similarity can be determined in a number of different manners. To determine sequence identity, sequences can be aligned using the methods and computer programs, including BLAST, available over the world wide web at ncbi.nlm.nih.gov/BLAST. See, e.g., Altschul et al. (1990), J. Mol. Biol. 215:403-10. Another alignment algorithm is FASTA, available in the Genetics Computing Group (GCG) package, from Madison, Wis., USA, a wholly owned subsidiary of Oxford Molecular Group, Inc. Other techniques for alignment are described in Methods in Enzymology, vol. 266: Computer Methods for Macromolecular Sequence Analysis (1996), ed. Doolittle, Academic Press, Inc., a division of Harcourt Brace & Co., San Diego, Calif., USA. Of particular interest are alignment programs that permit gaps in the sequence. The Smith-Waterman is one type of algorithm that permits gaps in sequence alignments. See Meth. Mol. Biol. 70: 173-187 (1997). Also, the GAP program using the Needleman and Wunsch alignment method can be utilized to align sequences. See J. Mol. Biol. 48: 443-453 (1970).

[0026] Before the present invention is further described, it is to be understood that this invention is not limited to particular embodiments described, as such may, of course, vary. It is also to be understood that the terminology used herein is for the purpose of describing particular embodiments only, and is not intended to be limiting, since the scope of the present invention will be limited only by the appended claims.

[0027] Where a range of values is provided, it is understood that each intervening value, to the tenth of the unit of the lower limit unless the context clearly dictates otherwise, between the upper and lower limit of that range and any other stated or intervening value in that stated range, is encompassed within the invention. The upper and lower limits of these smaller ranges may independently be included in the smaller ranges, and are also encompassed within the invention, subject to any specifically excluded limit in the stated range. Where the stated range includes one or both of the limits, ranges excluding either or both of those included limits are also included in the invention.

[0028] Unless defined otherwise, all technical and scientific terms used herein have the same meaning as commonly understood by one of ordinary skill in the art to which this invention belongs. Although any methods and materials similar or equivalent to those described herein can also be used in the practice or testing of the present invention, the preferred methods and materials are now described. All publications mentioned herein are incorporated herein by reference to disclose and describe the methods and/or materials in connection with which the publications are cited.

[0029] It must be noted that as used herein and in the appended claims, the singular forms “a,” “an,” and “the” include plural referents unless the context clearly dictates otherwise. Thus, for example, reference to “a Cas9 polypeptide” includes a plurality of such polypeptides and reference to “the guide RNA” includes reference to one or more guide RNAs and equivalents thereof known to those skilled in the art, and so forth. It is further noted that the claims may be drafted to exclude any optional element. As such, this statement is intended to serve as antecedent basis for use of such exclusive terminology as “solely,” “only” and the like in connection with the recitation of claim elements, or use of a “negative” limitation.

[0030] It is appreciated that certain features of the invention, which are, for clarity, described in the context of separate embodiments, may also be provided in combination in a single embodiment. Conversely, various features of the invention, which are, for brevity, described in the context of a single embodiment, may also be provided separately or in any suitable sub-combination. All combinations of the embodiments pertaining to the invention are specifically embraced by the present invention and are disclosed herein just as if each and every combination was individually and explicitly disclosed. In addition, all sub-combinations of the various embodiments and elements thereof are also specifically embraced by the present invention and are disclosed herein just as if each and every such sub-combination was individually and explicitly disclosed herein.

[0031] The publications discussed herein are provided solely for their disclosure prior to the filing date of the present application. Nothing herein is to be construed as an admission that the present invention is not entitled to antedate such publication by virtue of prior invention. Further, the dates of publication provided may be different from the actual publication dates which may need to be independently confirmed.

### DETAILED DESCRIPTION

[0032] The present disclosure provides a composition comprising an RNA-guided endonuclease and an agent that decreases the acidity of an endosome. The present disclosure provides a composition comprising: a) a ribonucleoprotein (RNP) complex comprising: i) an RNA-guided endonuclease; and ii) a guide RNA comprising a segment that binds to the RNA-guided endonuclease and a segment that binds to a target nucleic acid; and b) an agent that decreases the acidity of an endosome. The present disclosure provides methods of binding a target nucleic acid in a eukaryotic cell; and methods of genetically modifying a target eukaryotic cell.

### Compositions

[0033] The present disclosure provides a composition comprising an RNA-guided endonuclease and an agent that decreases the acidity of an endosome. The present disclosure provides a composition comprising: a) a ribonucleoprotein (RNP) complex comprising: i) an RNA-guided endonuclease; and ii) a guide RNA comprising a segment that binds to the RNA-guided endonuclease and a segment that binds to a target nucleic acid; and b) an agent that decreases the acidity of an endosome.

[0034] In some cases, a composition of the present disclosure is a genome editing composition; e.g., the composition comprises, in addition to an agent that decreases the acidity of an endosome: i) an RNA-guided endonuclease; and ii) a guide RNA comprising a segment that binds to the RNA-guided endonuclease and a segment that binds to a target nucleic acid in the genome of a target eukaryotic cell. In some cases, a genome-editing composition of the present disclosure comprises, in addition to an agent that decreases the acidity of an endosome: i) an RNA-guided endonuclease; ii) a guide RNA comprising a segment that binds to the RNA-guided endonuclease and a segment that binds to a target nucleic acid in the genome of a target eukaryotic cell; and iii) a donor template nucleic acid. Inclusion of an agent that decreases the acidity of an endosome in a genome editing composition of the present disclosure increases the efficiency of genome editing. For example, where the target eukaryotic cell is a cell population comprising a plurality of the target eukaryotic cells, use of a genome-editing composition of the present disclosure results in an increase of at least 5%, at least 10%, at least 15%, at least 20%, at least 25%, at least 30%, at least 40%, at least 50%, at least 60%, at least 70%, at least 80%, at least 90%, at least 2-fold, at least 2.5-fold, at least 5-fold, at least 10-fold, or more than 10-fold, in the proportion of the target eukaryotic cell population that undergoes genome editing, compared to the proportion of the target eukaryotic cell population that undergoes genome editing when the genome editing composition does not include the agent that decreases the acidity of an endosome. In some cases, the percent of alleles in the target eukaryotic cell population that undergoes genome editing increases at least 5%, at least 10%, at least 15%, at least 20%, at least 25%, at least 30%, at least 40%, at least 50%, at least 60%, at least 70%, at least 80%, at least 90%, at least 2-fold, at least 2.5-fold, at least 5-fold, at least 10-fold, or more than 10-fold, when a genome-editing composition of the present disclosure is used, compared to the percent of alleles in the target eukaryotic cell population that undergoes genome editing when the genome editing composition does not include the agent that decreases the acidity of an endosome.

[0035] An agent that decreases the acidity of an endosome can be present in a composition of the present disclosure in a concentration of from 2 nM to 200 nM, e.g., from 2 nM to 5 nM, from 5 nM to 10 nM, from 10 nM to 25 nM, from 25 nM to 50 nM, from 50 nM to 75 nM, from 75 nM to 100 nM, from 100 nM to 150 nM, or from 150 nM to 200 nM.

[0036] In some cases, a composition of the present disclosure comprises: a) a ribonucleoprotein (RNP) complex comprising: i) an RNA-guided endonuclease; and ii) a guide RNA comprising a segment that binds to the RNA-guided endonuclease and a segment that binds to a target nucleic acid; and b) an agent that decreases the acidity of an endosome, wherein the agent is present in the composition in a concentration of from 2 nM to 200 nM, e.g., from 2 nM to 5 nM, from 5 nM to 10 nM, from 10 nM to 25 nM, from 25 nM to 50 nM, from 50 nM to 75 nM, from 75 nM to 100 nM, from 100 nM to 150 nM, or from 150 nM to 200 nM. In some cases, a composition of the present disclosure comprises: a) a ribonucleoprotein (RNP) complex comprising: i) an RNA-guided endonuclease; ii) a guide RNA comprising a segment that binds to the RNA-guided endonuclease and a segment that binds to a target nucleic acid; and iii) a donor template nucleic acid; and b) an agent that decreases the acidity of an endosome, wherein the agent is present in the composition in a concentration of from 2 nM to 200 nM, e.g., from 2 nM to 5 nM, from 5 nM to 10 nM, from 10 nM to 25 nM, from 25 nM to 50 nM, from 50 nM to 75 nM, from 75 nM to 100 nM, from 100 nM to 150 nM, or from 150 nM to 200 nM. In some cases, a composition of the present disclosure comprises: a) a ribonucleoprotein (RNP) complex comprising: i) an RNA-guided endonuclease; ii) a guide RNA comprising a segment that binds to the RNA-guided endonuclease and a segment that binds to a target nucleic acid; b) a donor template nucleic acid; and c) an agent that decreases the acidity of an endosome, wherein the agent is present in the composition in a concentration of from 2 nM to 200 nM, e.g., from 2 nM to 5 nM, from 5 nM to 10 nM, from 10 nM to 25 nM, from 25 nM to 50 nM, from 50 nM to 75 nM, from 75 nM to 100 nM, from 100 nM to 150 nM, or from 150 nM to 200 nM. In some cases, the agent is bafilomycin A.

[0037] In some cases, a composition of the present disclosure comprises: a) a ribonucleoprotein (RNP) complex comprising: i) an RNA-guided endonuclease; and ii) a single-molecule guide RNA (“single-guide RNA” or “sgRNA”) comprising a segment that binds to the RNA-guided endonuclease and a segment that binds to a target nucleic acid; and b) an agent that decreases the acidity of an endosome, wherein the agent is present in the composition in a concentration of from 2 nM to 200 nM, e.g., from 2 nM to 5 nM, from 5 nM to 10 nM, from 10 nM to 25 nM, from 25 nM to 50 nM, from 50 nM to 75 nM, from 75 nM to 100 nM, from 100 nM to 150 nM, or from 150 nM to 200 nM. In some cases, a composition of the present disclosure comprises: a) a ribonucleoprotein (RNP) complex comprising: i) an RNA-guided endonuclease; ii) a sgRNA comprising a segment that binds to the RNA-guided endonuclease and a segment that binds to a target nucleic acid; and iii) a donor template nucleic acid; and b) an agent that decreases the acidity of an endosome, wherein the agent is present in the composition in a concentration of from 2 nM to 200 nM, e.g., from 2 nM to 5 nM, from 5 nM to 10 nM, from 10 nM to 25 nM, from 25 nM to 50 nM, from 50 nM to 75 nM, from 75 nM to 100 nM, from 100 nM to 150 nM, or from 150 nM to 200 nM. In some cases, a composition of the present disclosure comprises: a) a ribonucleoprotein (RNP) complex comprising: i) an RNA-guided endonuclease; ii) a sgRNA comprising a segment that binds to the RNA-guided endonuclease and a segment that binds to a target nucleic acid; b) a donor template nucleic acid; and c) an agent that decreases the acidity of an endosome, wherein the agent is present in the composition in a concentration of from 2 nM to 200 nM, e.g., from 2 nM to 5 nM, from 5 nM to 10 nM, from 10 nM to 25 nM, from 25 nM to 50 nM, from 50 nM to 75 nM, from 75 nM to 100 nM, from 100 nM to 150 nM, or from 150 nM to 200 nM. In some cases, the agent is bafilomycin A.

[0038] In some cases, a composition of the present disclosure comprises: a) a ribonucleoprotein (RNP) complex comprising: i) an RNA-guided endonuclease; and ii) a dual-molecule guide RNA (“dual-guide RNA” or “dgRNA”) comprising a first RNA comprising segment that binds to the RNA-guided endonuclease, and a second RNA comprising a segment that binds to a target nucleic acid, where the first RNA comprises a segment that hybridizes to the second RNA; and b) an agent that decreases the acidity of an endosome, wherein the agent is present in the composition in a concentration of from 2 nM to 200 nM, e.g., from 2 nM to 5 nM, from 5 nM to 10 nM, from 10 nM to 25 nM, from 25 nM to 50 nM, from 50 nM to 75 nM, from 75 nM to 100 nM, from 100 nM to 150 nM, or from 150 nM to 200 nM. In some cases, a composition of the present disclosure comprises: a) a ribonucleoprotein (RNP) complex comprising: i) an RNA-guided endonuclease; ii) a dgRNA; and b) an agent that decreases the acidity of an endosome, wherein the agent is present in the composition in a concentration of from 2 nM to 200 nM, e.g., from 2 nM to 5 nM, from 5 nM to 10 nM, from 10 nM to 25 nM, from 25 nM to 50 nM, from 50 nM to 75 nM, from 75 nM to 100 nM, from 100 nM to 150 nM, or from 150 nM to 200 nM. In some cases, a composition of the present disclosure comprises: a) a ribonucleoprotein (RNP) complex comprising: i) an RNA-guided endonuclease; ii) a dgRNA; b) a donor template nucleic acid; and c) an agent that decreases the acidity of an endosome, wherein the agent is present in the composition in a concentration of from 2 nM to 200 nM, e.g., from 2 nM to 5 nM, from 5 nM to 10 nM, from 10 nM to 25 nM, from 25 nM to 50 nM, from 50 nM to 75 nM, from 75 nM to 100 nM, from 100 nM to 150 nM, or from 150 nM to 200 nM. In some cases, the agent is bafilomycin A.

Agents that Decrease the Acidity of an Endosome

[0039] An agent that decreases the acidity of an endosome, and that is suitable for use in a composition or method of the present disclosure, is generally an agent that increases the pH of an endosome by from 0.5 to 5 pH units, e.g., from 0.5 pH unit to 1.0 pH unit, from 1.0 pH unit to 1.5 pH units, from 1.5 pH units to 2.0 pH units, from 2.0 pH units to 2.5 pH units, from 2.5 pH units to 3.0 pH units, from 3.0 pH units to 3.5 pH units, from 3.5 pH units to 4.0 pH units, from 4.0 pH units to 4.5 pH units, or from 4.5 pH units to 5.0 pH units.

[0040] In some cases, a suitable agent that decreases the acidity of endosomes is selected from the group consisting of amantadine, amiodarone, ammonium chloride, azithromycin, bafilomycin A1, a benzolactone enamide, bepridil, diphyllin, an indolyl, a macrolactone, monensin, nigericin, a plecomacrolide, a quinoline, and a sulfonamide.

[0041] In some cases, a suitable agent that decreases the acidity of endosomes is selected from the group consisting of a benzolactone enamide selected from the group consisting of salicylihalamide, lobatamide, apicularen, oximidine, and cruentaren.

[0042] In some cases, a suitable agent that decreases the acidity of endosomes is a macrolactone selected from the group consisting of archazolid and azithromycin

[0043] In some cases, a suitable agent that decreases the acidity of endosomes is a plecomacrolide selected from the group consisting of bafilomycin A1 and concanamycin.

[0044] In some cases, a suitable agent that decreases the acidity of endosomes is a quinoline selected from the group consisting of amodiaquine, chloroquine, and hydroxychloroquine.

[0045] In some cases, a suitable agent that decreases the acidity of endosomes is chloroquine. In some cases, a suitable agent that decreases the acidity of endosomes is a sulfonamide selected from the group consisting of 16D2 (5-bromo-2-{[(4-chloro-3-nitrophenyl)sulfonyl]amino}-N-(2,5-dichlorophenyl)benzamide) and 16D10 (5-chloro-2-{[(4-chloro-3-nitrophenyl)sulfonyl]amino}-N-(4-chlorophenyl)benzamide). In some cases, a suitable agent that decreases the acidity of endosomes is bafilomycin A1.

[0046] [NOTE TO INVENTORS: PLEASE LIST ANY OTHER AGENTS THAT SHOULD BE INCLUDED.]

### RNA-Guided Endonucleases

[0047] RNA-guided endonucleases suitable for inclusion in a composition of the present disclosure include any known RNA-guided endonuclease. Examples of suitable RNA-guided endonucleases include, but are not limited to, CRISPR/Cas endonucleases (e.g., class 2 CRISPR/Cas endonucleases such as a type II, type V, or type VI CRISPR/Cas endonucleases). In some cases, a suitable RNA-guided endonuclease is a class 2 CRISPR/Cas endonuclease. In some cases, a suitable RNA-guided endonuclease is a class 2 type II CRISPR/Cas endonuclease (e.g., a Cas9 protein). In some cases, a suitable RNA-guided endonuclease is a class 2 type V CRISPR/Cas endonuclease (e.g., a Cpf1 protein, a C2c1 protein, or a C2c3 protein). In some cases, a suitable RNA-guided endonuclease is a class 2 type VI CRISPR/Cas endonuclease (e.g., a C2c2 protein). In some cases, a suitable RNA-guided endonuclease is a CasX polypeptide. In some cases, a suitable RNA-guided endonuclease is a CasY polypeptide. In some cases, a suitable RNA-guided endonuclease is a CjCas9 polypeptide.

[0048] In some cases, an RNA-guided endonuclease is a fusion protein that is fused to a heterologous polypeptide (also referred to as a “fusion partner”). In some cases, an RNA-guided endonuclease is fused to an amino acid sequence (a fusion partner) that provides for subcellular localization, i.e., the fusion partner is a subcellular localization sequence (e.g., one or more nuclear localization signals (NLSs) for targeting to the nucleus, two or more NLSs, three or more NLSs, etc.). In some embodiments, an RNA-guided endonuclease is fused to an amino acid sequence (a fusion partner) that provides a tag (i.e., the fusion partner is a detectable label) for ease of tracking and/or purification (e.g., a fluorescent protein, e.g., green fluorescent protein (GFP), yellow fluorescent protein (YFP), red fluorescent protein (RFP), cyan fluorescent protein (CFP), mCherry, tdTomato, and the like; a histidine tag, e.g., a 6×His tag; a hemagglutinin (HA) tag; a FLAG tag; a Myc tag; and the like). In some cases, the fusion partner can provide for increased or decreased stability (i.e., the fusion partner can be a stability control peptide, e.g., a degron, which in some cases is controllable (e.g., a temperature sensitive or drug controllable degron sequence).

[0049] In some cases, an RNA-guided endonuclease is conjugated (e.g., fused) to a polypeptide permeant domain to promote uptake by the cell (i.e., the fusion partner promotes uptake by a cell). A number of permeant domains are known in the art and may be used, including peptides, peptidomimetics, and non-peptide carriers. (See, for example, Futaki et al. (2003) Curr Protein Pept Sci. 2003 April; 4(2): 87-9 and 446; and Wender et al. (2000) Proc. Natl. Acad. Sci. U.S.A. 2000 Nov. 21; 97(24):13003-8; published U.S. Patent applications 20030220334; 20030083256; 20030032593; and 20030022831, herein specifically incorporated by reference for the teachings of translocation peptides and peptoids). The nona-arginine (R9) sequence is one of the more efficient PTDs that have been characterized (Wender et al. 2000; Uemura et al. 2002). The site at which the fusion is made may be selected in order to optimize the biological activity, secretion or binding characteristics of the polypeptide. The optimal site can be determined by routine experimentation.

[0050] In some cases, a genome editing nuclease includes a “Protein Transduction Domain” or PTD (also known as a CPP—cell penetrating peptide), which refers to a polypeptide, polynucleotide, carbohydrate, or organic or inorganic compound that facilitates traversing a lipid bilayer, micelle, cell membrane, organelle membrane, or vesicle membrane. A PTD attached to another molecule, which can range from a small polar molecule to a large macromolecule and/or a nanoparticle, facilitates the molecule traversing a membrane, for example going from extracellular space to intracellular space, or cytosol to within an organelle. In some embodiments, a PTD is covalently linked to the amino terminus a polypeptide (e.g., a genome editing nuclease, e.g., a Cas9 protein). In some embodiments, a PTD is covalently linked to the carboxyl terminus of a polypeptide (e.g., an RNA-guided endonuclease, e.g., a Cas9 protein). In some cases, the PTD is inserted internally in the RNA-guided endonuclease (e.g., Cas9 protein) (i.e., is not at the N- or C-terminus of the genome editing nuclease). In some cases, an RNA-guided endonuclease (e.g., a Cas9 protein) includes (is conjugated to, is fused to) one or more PTDs (e.g., two or more, three or more, four or more PTDs). In some cases a PTD includes a nuclear localization signal (NLS) (e.g., in some cases 2 or more, 3 or more, 4 or more, or 5 or more NLSs).

[0051] In some cases, an RNA-guided endonuclease (e.g., a Cas9 protein) includes one or more NLSs (e.g., 2 or more, 3 or more, 4 or more, or 5 or more NLSs). In some embodiments, a PTD is covalently linked to a nucleic acid (e.g., a CRISPR/Cas guide RNA, a polynucleotide encoding a CRISPR/Cas guide RNA, a polynucleotide encoding a class 2 CRISPR/Cas endonuclease such as a Cas9 protein or a type V or type VI CRISPR/Cas protein, etc.). Examples of PTDs include but are not limited to a polyarginine sequence comprising a number of arginines sufficient to direct entry into a cell (e.g., 3, 4, 5, 6, 7, 8, 9, 10, or 10-50 arginines); a VP22 domain (Zender et al. (2002) Cancer Gene Ther. 9(6):489-96); an Drosophila Antennapedia protein transduction domain (Noguchi et al. (2003) Diabetes 52(7):1732-1737); a truncated human calcitonin peptide (Trehin et al. (2004) Pharm. Research 21:1248-1256); polylysine (Wender et al. (2000) Proc. Natl. Acad. Sci. USA 97:13003-13008). In some embodiments, the PTD is an activatable CPP (ACPP) (Aguilera et al. (2009) Integr Biol (Camb) June; 1(5-6): 371-381). ACPPs comprise a polycationic CPP (e.g., Arg9 or “R9”) connected via a cleavable linker to a matching polyanion (e.g., Glu9 or “E9”), which reduces the net charge to nearly zero and thereby inhibits adhesion and uptake into cells. Upon cleavage of the linker, the polyanion is released, locally unmasking the polyarginine and its inherent adhesiveness, thus “activating” the ACPP to traverse the membrane.

[0052] An RNA-guided endonuclease (e.g., a Cas9 protein) can have multiple (1 or more, 2 or more, 3 or more, etc.) fusion partners in any combination of the above. As an illustrative example, an RNA-guided endonuclease (e.g., a Cas9 protein) can have a fusion partner that provides for tagging (e.g., GFP), and can also have a subcellular localization sequence (e.g., one or more NLSs). In some cases, such a fusion protein might also have a tag for ease of tracking and/or purification (e.g., a histidine tag, e.g., a 6×His tag; a hemagglutinin (HA) tag; a FLAG tag; a Myc tag; and the like). As another illustrative example, an RNA-guided endonuclease (e.g., a Cas9 protein) can have one or more NLSs (e.g., two or more, three or more, four or more, five or more, 1, 2, 3, 4, or 5 NLSs). In some cases a fusion partner (or multiple fusion partners, e.g., 1, 2, 3, 4, or 5 NLSs) (e.g., an NLS, a tag, a fusion partner providing an activity, etc.) is located at or near the C-terminus of the RNA-guided endonuclease (e.g., Cas9 protein). In some cases a fusion partner (or multiple fusion partners, e.g., 1, 2, 3, 4, or 5 NLSs) (e.g., an NLS, a tag, a fusion partner providing an activity, etc.) is located at the N-terminus of the RNA-guided endonuclease (e.g., Cas9 protein). In some cases the genome editing nuclease (e.g., Cas9 protein) has a fusion partner (or multiple fusion partners, e.g., 1, 2, 3, 4, or 5 NLSs)(e.g., an NLS, a tag, a fusion partner providing an activity, etc.) at both the N-terminus and C-terminus.

Heterologous Polypeptides that Facilitate Uptake of an RNA-Guided Endonuclease

[0053] As noted above, a composition of the present disclosure can include a fusion polypeptide comprising: a) an RNA-guided endonuclease; and b) a heterologous fusion partner, where the heterologous fusion partner can be a heterologous polypeptide that facilitates uptake into a eukaryotic cell. Such a fusion polypeptide can be referred to herein as “a fusion RNA-guided endonuclease” or “a fusion RNA-guided endonuclease polypeptide.”

[0054] As noted above, a fusion RNA-guided endonuclease comprises a fusion partner that is a heterologous polypeptide that facilitates uptake of an RNP into a eukaryotic cell. In some cases, a fusion RNA-guided endonuclease polypeptide comprises two or more heterologous polypeptides that facilitate uptake of an RNP into a eukaryotic cell. In some cases, a fusion RNA-guided endonuclease polypeptide comprises two heterologous polypeptides that facilitate uptake of an RNP into a eukaryotic cell. In some cases, a fusion RNA-guided endonuclease polypeptide comprises three heterologous polypeptides that facilitate uptake of an RNP into a eukaryotic cell. In some cases, a fusion RNA-guided endonuclease polypeptide comprises four heterologous polypeptides that facilitate uptake of an RNP into a eukaryotic cell. In some cases, a fusion RNA-guided endonuclease polypeptide comprises five heterologous polypeptides that facilitate uptake of an RNP into a eukaryotic cell. In some cases, a fusion RNA-guided endonuclease polypeptide comprises six heterologous polypeptides that facilitate uptake of an RNP into a eukaryotic cell.

[0055] In some cases, a fusion RNA-guided endonuclease polypeptide comprises two or more heterologous polypeptides that facilitate uptake of an RNP into a eukaryotic cell. In some cases, the two or more heterologous polypeptides are separated by a linker of from 2 amino acids to 25 amino acids (e.g., 2 amino acids (aa), 3 aa, 4 aa, 5 aa, 6 aa, 7 aa, 8 aa, 9 aa, 10 aa, 11 aa, 12 aa, 13 aa, 14 aa, 15 aa, 16 aa, 17 aa, 18 aa, 19 aa, 20 aa, 21 aa, 22 aa, 23 aa, 24 aa, or 25 aa). Suitable linkers are described below.

[0056] A heterologous polypeptide that facilitates uptake of an RNP into a eukaryotic cell and that is suitable for inclusion in a fusion RNA-guided endonuclease polypeptide can have a length of from about 5 amino acids to about 70 amino acids, e.g., from 5 amino acids (aa) to 10 aa, from 10 aa to 15 aa, from 15 aa to 20 aa, from 20 aa to 25 aa, from 25 aa to 30 aa, from 30 aa to 35 aa, from 35 aa to 40 aa, from 40 aa to 45 aa, from 45 aa to 50 aa, from 50 aa to 55 aa, from 55 aa to 60 aa, from 60 aa to 65 aa, or from 65 aa to 70 aa. In some cases, a heterologous polypeptide that facilitates uptake of an RNP into a eukaryotic cell has a length of from 5 amino acids to 10 amino acids (e.g., 5, 6, 7, 8, 9, or 10 amino acids). In some cases, a heterologous polypeptide that facilitates uptake of an RNP into a eukaryotic cell has a length of 7 amino acids. In some cases, a heterologous polypeptide that facilitates uptake of an RNP into a eukaryotic cell has a length of from 10 amino acids to 15 amino acids (e.g., 10, 11, 12, 13, 14, or 15 amino acids). In some cases, a heterologous polypeptide that facilitates uptake of an RNP into a eukaryotic cell has a length of from 15 amino acids to 20 amino acids (e.g., 15, 16, 17, 18, 19, or 20 amino acids). In some cases, a heterologous polypeptide that facilitates uptake of an RNP into a eukaryotic cell has a length of from 20 amino acids to 25 amino acids (e.g., 20, 21, 22, 23, 24, or 25 amino acids).

[0057] A heterologous polypeptide that facilitates uptake of an RNP into a eukaryotic cell and that is suitable for inclusion in a fusion RNA-guided endonuclease polypeptide can have a high percentage of arginine and/or lysine residues. For example, a suitable heterologous polypeptide that facilitates uptake of an RNP into a eukaryotic cell can have an amino acid sequence comprising from 20% to 80% arginine and/or lysine residues. As an example, a suitable heterologous polypeptide that facilitates uptake of an RNP into a eukaryotic cell can have an amino acid sequence comprising from 20% to 80% lysine residues. As an example, a suitable heterologous polypeptide that facilitates uptake of an RNP into a eukaryotic cell can have an amino acid sequence comprising from 20% to 80% arginine+lysine residues.

[0058] In some cases, a heterologous polypeptide that facilitates uptake of an RNP into a eukaryotic cell and that is suitable for inclusion in a fusion RNA-guided endonuclease polypeptide comprises the amino acid sequence K-K/R-X-K/R, where X is any amino acid. In some cases, a heterologous polypeptide that facilitates uptake of an RNP into a eukaryotic cell and that is suitable for inclusion in a fusion RNA-guided endonuclease polypeptide comprises the amino acid sequence K-K/R-X-K/R, where X is any amino acid; and has a length of from 7 to 17 amino acids. In some cases, a heterologous polypeptide that facilitates uptake of an RNP into a eukaryotic cell and that is suitable for inclusion in a fusion polypeptide of the present disclosure comprises the amino acid sequence K-K/R-X-K/R, where X is any amino acid; and has a length of from 5 to 15 amino acids. In some cases, a heterologous polypeptide that facilitates uptake of an RNP into a eukaryotic cell and that is suitable for inclusion in a fusion polypeptide of the present disclosure comprises the amino acid sequence K-K/R-X-K/R, where X is any amino acid; and has a length of from 15 to 20 amino acids.

[0059] Non-limiting examples of suitable heterologous polypeptides that facilitate uptake of an RNP into a eukaryotic cell are presented in FIG. 1A-1G. In some cases, a heterologous polypeptide that facilitates uptake of an RNP into a eukaryotic cell and that is suitable for inclusion in a fusion RNA-guided endonuclease polypeptide comprises the amino acid sequence PKKKRKV (SEQ ID NO:1115). In some cases, a heterologous polypeptide that facilitates uptake of an RNP into a eukaryotic cell and that is suitable for inclusion in a fusion RNA-guided endonuclease polypeptide comprises the amino acid sequence PKKKRKV (SEQ ID NO:1115), and has a length of 7 amino acids. In some cases, a heterologous polypeptide that facilitates uptake of an RNP into a eukaryotic cell and that is suitable for inclusion in a fusion RNA-guided endonuclease polypeptide comprises the amino acid sequence RPAATKKAGQAKKKKLD (SEQ ID NO:1116). In some cases, a heterologous polypeptide that facilitates uptake of an RNP into a eukaryotic cell and that is suitable for inclusion in a fusion RNA-guided endonuclease polypeptide comprises the amino acid sequence RPAATKKAGQAKKKKLD (SEQ ID NO:1116), and has a length of 17 amino acids. In some cases, a heterologous polypeptide that facilitates uptake of an RNP into a eukaryotic cell and that is suitable for inclusion in a fusion RNA-guided endonuclease polypeptide comprises the amino acid sequence AVKRPAATKKAGQAKKKKLD (SEQ ID NO:1117). In some cases, a heterologous polypeptide that facilitates uptake of an RNP into a eukaryotic cell and that is suitable for inclusion in a fusion RNA-guided endonuclease polypeptide comprises the amino acid sequence AVKRPAATKKAGQAKKKKLD (SEQ ID NO:1117), and has a length of 20 amino acids. In some cases, a heterologous polypeptide that facilitates uptake of an RNP into a eukaryotic cell and that is suitable for inclusion in fusion RNA-guided endonuclease polypeptide comprises the amino acid sequence AVKRPAATKKAGQAKKK (SEQ ID NO: 1098). In some cases, a heterologous polypeptide that facilitates uptake of an RNP into a eukaryotic cell and that is suitable for inclusion in a fusion RNA-guided endonuclease polypeptide comprises the amino acid sequence AVKRPAATKKAGQAKKK (SEQ ID NO: 1098), and has a length of 17 amino acids. In some cases, a heterologous polypeptide that facilitates uptake of an RNP into a eukaryotic cell and that is suitable for inclusion in a fusion RNA-guided endonuclease polypeptide comprises the amino acid sequence KRPAATKKAGQAKKKKLD (SEQ ID NO:1118), and has a length of 18 amino acids. In some cases, a heterologous polypeptide that facilitates uptake of an RNP into a eukaryotic cell and that is suitable for inclusion in a fusion RNA-guided endonuclease polypeptide comprises the amino acid sequence PKKKRKVED (SEQ ID NO:1119); and has a length of 9 amino acids. In some cases, a heterologous polypeptide that facilitates uptake of an RNP into a eukaryotic cell and that is suitable for inclusion in a fusion RNA-guided endonuclease polypeptide comprises the amino acid sequence PKKKRKVDT (SEQ ID NO:1120); and has a length of 9 amino acids.

[0060] In some cases, a heterologous polypeptide that facilitates uptake of an RNP into a eukaryotic cell and that is suitable for inclusion in a fusion RNA-guided endonuclease polypeptide is at or near the N-terminus of an RNA-guided endonuclease polypeptide (e.g., a type II, type V, or type VI CRISPR/Cas site-directed modifying polypeptide). In some cases, a heterologous polypeptide that facilitates uptake of an RNP into a eukaryotic cell and that is suitable for inclusion in a fusion RNA-guided endonuclease polypeptide is at or near the C-terminus of an RNA-guided endonuclease polypeptide (e.g., a type II, type V, or type VI CRISPR/Cas site-directed modifying polypeptide). In some cases, a heterologous polypeptide that facilitates uptake of an RNP into a eukaryotic cell and that is suitable for inclusion in a fusion RNA-guided endonuclease polypeptide is located internally within an RNA-guided endonuclease polypeptide (e.g., a type II, type V, or type VI CRISPR/Cas site-directed modifying polypeptide).

[0061] In some cases, where a fusion RNA-guided endonuclease polypeptide comprises two or more heterologous polypeptides that facilitate uptake of an RNP into a eukaryotic cell, the two or more heterologous polypeptides are at or near the N-terminus of the RNA-guided endonuclease polypeptide. In some cases, where a fusion RNA-guided endonuclease polypeptide comprises two or more heterologous polypeptides that facilitate uptake of an RNP into a eukaryotic cell, the two or more heterologous polypeptides are at or near the C-terminus of the RNA-guided endonuclease polypeptide. In some cases, where a fusion RNA-guided endonuclease polypeptide comprises two or more heterologous polypeptides that facilitate uptake of an RNP into a eukaryotic cell, the two or more heterologous polypeptides are at or near the N-terminus and at or near the C-terminus of the RNA-guided endonuclease polypeptide. In some cases, where a fusion RNA-guided endonuclease polypeptide comprises two or more heterologous polypeptides that facilitate uptake of an RNP into a eukaryotic cell, the two or more heterologous polypeptides are at or near the N-terminus and located internally within the RNA-guided endonuclease polypeptide. In some cases, where a fusion RNA-guided endonuclease polypeptide comprises two or more heterologous polypeptides that facilitate uptake of an RNP into a eukaryotic cell, the two or more heterologous polypeptides are at or near the C-terminus and located internally within the RNA-guided endonuclease polypeptide.

### RNA-Guided Endonucleases

[0062] An RNA-guided endonuclease is also referred to herein as a “genome editing nuclease.” Examples of suitable genome editing nucleases are CRISPR/Cas endonucleases (e.g., class 2 CRISPR/Cas endonucleases such as a type II, type V, or type VI CRISPR/Cas endonucleases). A suitable genome editing nuclease is a CRISPR/Cas endonuclease (e.g., a class 2 CRISPR/Cas endonuclease such as a type II, type V, or type VI CRISPR/Cas endonuclease). In some cases, a genome targeting composition includes a class 2 CRISPR/Cas endonuclease. In some cases, a genome targeting composition includes a class 2 type II CRISPR/Cas endonuclease (e.g., a Cas9 protein). In some cases, a genome targeting composition includes a class 2 type V CRISPR/Cas endonuclease (e.g., a Cpf1 protein, a C2c1 protein, or a C2c3 protein). In some cases, a genome targeting composition includes a class 2 type VI CRISPR/Cas endonuclease (e.g., a C2c2 protein; also referred to as a “Cas13a” protein). Also suitable for use is a CasX protein. Also suitable for use is a CasY protein.

[0063] In some cases, a genome editing nuclease is a fusion protein that is fused to a heterologous polypeptide (also referred to as a “fusion partner”). In some cases, a genome editing nuclease is fused to an amino acid sequence (a fusion partner) that provides for subcellular localization, i.e., the fusion partner is a subcellular localization sequence (e.g., one or more nuclear localization signals (NLSs) for targeting to the nucleus, two or more NLSs, three or more NLSs, etc.).

[0064] In some cases, the genome-editing endonuclease is a Type II CRISPR/Case endonuclease. In some cases, the genome-editing endonuclease is a Cas9 polypeptide. The Cas9 protein is guided to a target site (e.g., stabilized at a target site) within a target nucleic acid sequence (e.g., a chromosomal sequence or an extrachromosomal sequence, e.g., an episomal sequence, a minicircle sequence, a mitochondrial sequence, a chloroplast sequence, etc.) by virtue of its association with the protein-binding segment of the Cas9 guide RNA. In some cases, a Cas9 polypeptide comprises an amino acid sequence having at least 50%, at least 60%, at least 70%, at least 80%, at least 90%, at least 95%, at least 98%, at least 99%, or more than 99%, amino acid sequence identity to the Streptococcus pyogenes Cas9 depicted in FIG. 3A. In some cases, the Cas9 polypeptide used in a composition or method of the present disclosure is a Staphylococcus aureus Cas9 (saCas9) polypeptide. In some cases, the saCas9 polypeptide comprises an amino acid sequence having at least 85%, at least 90%, at least 95%, at least 98%, at least 99%, or 100%, amino acid sequence identity to the saCas9 amino acid sequence depicted in FIG. 3G.

[0065] In some cases, a suitable Cas9 polypeptide comprises an amino acid sequence having at least 50%, at least 60%, at least 70%, at least 80%, at least 90%, at least 95%, at least 98%, at least 99%, or more than 99%, amino acid sequence identity to the Streptococcus pyogenes Cas9 depicted in FIG. 3A, but with K848A, K1003A, and R1060A substitutions. Slaymaker et al. (2016) Science 351: 84-88. In some cases, a suitable Cas9 polypeptide comprises the amino acid sequence depicted in FIG. 3E.

[0066] In some cases, a suitable Cas9 polypeptide is a high-fidelity (HF) Cas9 polypeptide. Kleinstiver et al. (2016) Nature 529:490. For example, amino acids N497, R661, Q695, and Q926 of the amino acid sequence depicted in FIG. 3A are substituted, e.g., with alanine. For example, an HF Cas9 polypeptide can comprise an amino acid sequence having at least 90%, at least 95%, at least 98%, at least 99%, or 100%, amino acid sequence identity to the amino acid sequence depicted in FIG. 3A, where amino acids N497, R661, Q695, and Q926 are substituted, e.g., with alanine. In some cases, a suitable Cas9 polypeptide comprises the amino acid sequence depicted in FIG. 3F.

[0067] In some cases, a suitable Cas9 polypeptide exhibits altered PAM specificity. See, e.g., Kleinstiver et al. (2015) Nature 523:481.

[0068] In some cases, the genome-editing endonuclease is a type V CRISPR/Cas endonuclease. In some cases a type V CRISPR/Cas endonuclease is a Cpf1 protein. In some cases, a Cpf1 protein comprises an amino acid sequence having at least 30%, at least 35%, at least 40%, at least 45%, at least 50%, at least 55%, at least 60%, at least 65%, at least 70%, at least 75%, at least 80%, at least 85%, at least 90%, at least 95%, at least 90%, or 100%, amino acid sequence identity to the Cpf1 amino acid sequence depicted in FIG. 3H. In some cases, a Cpf1 protein comprises an amino acid sequence having at least 30%, at least 35%, at least 40%, at least 45%, at least 50%, at least 55%, at least 60%, at least 65%, at least 70%, at least 75%, at least 80%, at least 85%, at least 90%, at least 95%, at least 90%, or 100%, amino acid sequence identity to the Cpf1 amino acid sequence depicted in FIG. 3I. In some cases, a Cpf1 protein comprises the amino acid sequence depicted in FIG. 3J.

[0069] A nucleic acid that binds to a class 2 CRISPR/Cas endonuclease (e.g., a Cas9 protein; a type V or type VI CRISPR/Cas protein; a Cpf1 protein; etc.) and targets the complex to a specific location within a target nucleic acid is referred to herein as a “guide RNA” or “CRISPR/Cas guide nucleic acid” or “CRISPR/Cas guide RNA.” A guide RNA provides target specificity to the complex (the RNP complex) by including a targeting segment, which includes a guide sequence (also referred to herein as a targeting sequence), which is a nucleotide sequence that is complementary to a sequence of a target nucleic acid.

[0070] In some cases, a guide RNA includes two separate nucleic acid molecules: an “activator” and a “targeter” and is referred to herein as a “dual guide RNA”, a “double-molecule guide RNA”, a “two-molecule guide RNA”, or a “dgRNA.” In some cases, the guide RNA is one molecule (e.g., for some class 2 CRISPR/Cas proteins, the corresponding guide RNA is a single molecule; and in some cases, an activator and targeter are covalently linked to one another, e.g., via intervening nucleotides), and the guide RNA is referred to as a “single guide RNA”, a “single-molecule guide RNA,” a “one-molecule guide RNA”, or simply “sgRNA.”

[0071] In some cases, a composition of the present disclosure comprises an RNA-guided endonuclease, or both an RNA-guided endonuclease and a guide RNA. In some cases, e.g., where a target nucleic acid comprises a deleterious mutation in a defective allele (e.g., a deleterious mutation in a retinal cell target nucleic acid), the RNA-guided endonuclease/guide RNA complex, together with a donor nucleic acid comprising a nucleotide sequence that corrects the deleterious mutation (e.g., a donor nucleic acid comprising a nucleotide sequence that encodes a functional copy of the protein encoded by the defective allele), can be used to correct the deleterious mutation, e.g., via homology-directed repair (HDR).

[0072] In some cases, a composition of the present disclosure comprises: i) an RNA-guided endonuclease; and ii) one guide RNA. In some cases, the guide RNA is a single-molecule (or “single guide”) guide RNA (an “sgRNA”). In some cases, the guide RNA is a dual-molecule (or “dual-guide”) guide RNA (“dgRNA”).

[0073] In some cases, a composition of the present disclosure comprises: i) an RNA-guided endonuclease; and ii) 2 separate sgRNAs, where the 2 separate sgRNAs provide for deletion of a target nucleic acid via non-homologous end joining (NHEJ). In some cases, the guide RNAs are sgRNAs. In some cases, the guide RNAs are dgRNAs.

[0074] In some cases, a composition of the present disclosure comprises: i) a Cpf1 polypeptide; and ii) a guide RNA precursor; in these cases, the precursor can be cleaved by the Cpf1 polypeptide to generate 2 or more guide RNAs.

### Class 2 CRISPR/Cas Endonucleases

[0075] RNA-mediated adaptive immune systems in bacteria and archaea rely on Clustered Regularly Interspaced Short Palindromic Repeat (CRISPR) genomic loci and CRISPR-associated (Cas) proteins that function together to provide protection from invading viruses and plasmids. In some embodiments, a genome editing nuclease of a genome targeting composition of the present disclosure is a class 2 CRISPR/Cas endonuclease. Thus in some cases, a subject genome targeting composition includes a class 2 CRISPR/Cas endonuclease (or a nucleic encoding the endonuclease). In class 2 CRISPR systems, the functions of the effector complex (e.g., the cleavage of target DNA) are carried out by a single endonuclease (e.g., see Zetsche et al., Cell. 2015 Oct. 22; 163(3):759-71; Makarova et al., Nat Rev Microbiol. 2015 November; 13(11):722-36; Shmakov et al., Mol Cell. 2015 Nov. 5; 60(3):385-97); and Shmakov et al. (2017) Nature Reviews Microbiology 15:169. As such, the term “class 2 CRISPR/Cas protein” is used herein to encompass the endonuclease (the target nucleic acid cleaving protein) from class 2 CRISPR systems. Thus, the term “class 2 CRISPR/Cas endonuclease” as used herein encompasses type II CRISPR/Cas proteins (e.g., Cas9); type V-A CRISPR/Cas proteins (e.g., Cpf1 (also referred to a “Cas12a”)); type V-B CRISPR/Cas proteins (e.g., C2c1 (also referred to as “Cas12b”)); type V-C CRISPR/Cas proteins (e.g., C2c3 (also referred to as “Cas12c”)); type V-U1 CRISPR/Cas proteins (e.g., C2c4); type V-U2 CRISPR/Cas proteins (e.g., C2c8); type V-U5 CRISPR/Cas proteins (e.g., C2c5); type V-U4 CRISPR/Cas proteins (e.g., C2c9); type V-U3 CRISPR/Cas proteins (e.g., C2c10); type VI-A CRISPR/Cas proteins (e.g., C2c2 (also known as “Cas13a”)); type VI-B CRISPR/Cas proteins (e.g., Cas13b (also known as C2c4)); and type VI-C CRISPR/Cas proteins (e.g., Cas13c (also known as C2c7)). To date, class 2 CRISPR/Cas proteins encompass type II, type V, and type VI CRISPR/Cas proteins, but the term is also meant to encompass any class 2 CRISPR/Cas protein suitable for binding to a corresponding guide RNA and forming an RNP complex.

### Type II CRISPR/Cas Endonucleases (e.g., Cas 9)

[0076] In natural Type II CRISPR/Cas systems, Cas9 functions as an RNA-guided endonuclease that uses a dual-guide RNA having a crRNA and trans-activating crRNA (tracrRNA) for target recognition and cleavage by a mechanism involving two nuclease active sites in Cas9 that together generate double-stranded DNA breaks (DSBs), or can individually generate single-stranded DNA breaks (SSBs). The Type II CRISPR endonuclease Cas9 and engineered dual-(dgRNA) or single guide RNA (sgRNA) form a ribonucleoprotein (RNP) complex that can be targeted to a desired DNA sequence. Guided by a dual-RNA complex or a chimeric single-guide RNA, Cas9 generates site-specific DSBs or SSBs within double-stranded DNA (dsDNA) target nucleic acids, which are repaired either by non-homologous end joining (NHEJ) or homology-directed recombination (HDR).

[0077] As noted above, in some cases, a genome targeting composition of the present disclosure includes a type II CRISPR/Cas endonuclease. A type II CRISPR/Cas endonuclease is a type of class 2 CRISPR/Cas endonuclease. In some cases, the type II CRISPR/Cas endonuclease is a Cas9 protein. A Cas9 protein forms a complex with a Cas9 guide RNA. The guide RNA provides target specificity to a Cas9-guide RNA complex by having a nucleotide sequence (a guide sequence) that is complementary to a sequence (the target site) of a target nucleic acid (as described elsewhere herein). The Cas9 protein of the complex provides the site-specific activity. In other words, the Cas9 protein is guided to a target site (e.g., stabilized at a target site) within a target nucleic acid sequence (e.g. a chromosomal sequence or an extrachromosomal sequence, e.g., an episomal sequence, a minicircle sequence, a mitochondrial sequence, a chloroplast sequence, etc.) by virtue of its association with the protein-binding segment of the Cas9 guide RNA.

[0078] A Cas9 protein can bind and/or modify (e.g., cleave, nick, methylate, demethylate, etc.) a target nucleic acid and/or a polypeptide associated with target nucleic acid (e.g., methylation or acetylation of a histone tail)(e.g., when the Cas9 protein includes a fusion partner with an activity). In some cases, the Cas9 protein is a naturally-occurring protein (e.g., naturally occurs in bacterial and/or archaeal cells). In other cases, the Cas9 protein is not a naturally-occurring polypeptide (e.g., the Cas9 protein is a variant Cas9 protein, a chimeric protein, and the like).

[0079] Examples of suitable Cas9 proteins include, but are not limited to, those set forth in SEQ ID NOs: 5-816. Naturally occurring Cas9 proteins bind a Cas9 guide RNA, are thereby directed to a specific sequence within a target nucleic acid (a target site), and cleave the target nucleic acid (e.g., cleave dsDNA to generate a double strand break, cleave ssDNA, cleave ssRNA, etc.). A chimeric Cas9 protein is a fusion protein comprising a Cas9 polypeptide that is fused to a heterologous protein (referred to as a fusion partner), where the heterologous protein provides an activity (e.g., one that is not provided by the Cas9 protein). The fusion partner can provide an activity, e.g., enzymatic activity (e.g., nuclease activity, activity for DNA and/or RNA methylation, activity for DNA and/or RNA cleavage, activity for histone acetylation, activity for histone methylation, activity for RNA modification, activity for RNA-binding, activity for RNA splicing etc.). In some cases a portion of the Cas9 protein (e.g., the RuvC domain and/or the HNH domain) exhibits reduced nuclease activity relative to the corresponding portion of a wild type Cas9 protein (e.g., in some cases the Cas9 protein is a nickase). In some cases, the Cas9 protein is enzymatically inactive, or has reduced enzymatic activity relative to a wild-type Cas9 protein (e.g., relative to Streptococcus pyogenes Cas9).

[0080] Assays to determine whether given protein interacts with a Cas9 guide RNA can be any convenient binding assay that tests for binding between a protein and a nucleic acid. Suitable binding assays (e.g., gel shift assays) will be known to one of ordinary skill in the art (e.g., assays that include adding a Cas9 guide RNA and a protein to a target nucleic acid).

[0081] Assays to determine whether a protein has an activity (e.g., to determine if the protein has nuclease activity that cleaves a target nucleic acid and/or some heterologous activity) can be any convenient assay (e.g., any convenient nucleic acid cleavage assay that tests for nucleic acid cleavage). Suitable assays (e.g., cleavage assays) will be known to one of ordinary skill in the art and can include adding a Cas9 guide RNA and a protein to a target nucleic acid.

[0082] In some cases, a chimeric Cas9 protein includes a heterologous polypeptide that has enzymatic activity that modifies target nucleic acid (e.g., nuclease activity, methyltransferase activity, demethylase activity, DNA repair activity, DNA damage activity, deamination activity, dismutase activity, alkylation activity, depurination activity, oxidation activity, pyrimidine dimer forming activity, integrase activity, transposase activity, recombinase activity, polymerase activity, ligase activity, helicase activity, photolyase activity or glycosylase activity).

[0083] In other cases, a chimeric Cas9 protein includes a heterologous polypeptide that has enzymatic activity that modifies a polypeptide (e.g., a histone) associated with target nucleic acid (e.g., methyltransferase activity, demethylase activity, acetyltransferase activity, deacetylase activity, kinase activity, phosphatase activity, ubiquitin ligase activity, deubiquitinating activity, adenylation activity, deadenylation activity, SUMOylating activity, deSUMOylating activity, ribosylation activity, deribosylation activity, myristoylation activity or demyristoylation activity).

[0084] Many Cas9 orthologs from a wide variety of species have been identified and in some cases the proteins share only a few identical amino acids. Identified Cas9 orthologs have similar domain architecture with a central HNH endonuclease domain and a split RuvC/RNaseH domain (e.g., RuvCI, RuvCII, and RuvCIII) (e.g., see Table 1). For example, a Cas9 protein can have 3 different regions (sometimes referred to as RuvC-I, RuvC-II, and RucC-III), that are not contiguous with respect to the primary amino acid sequence of the Cas9 protein, but fold together to form a RuvC domain once the protein is produced and folds. Thus, Cas9 proteins can be said to share at least 4 key motifs with a conserved architecture. Motifs 1, 2, and 4 are RuvC like motifs while motif 3 is an HNH-motif. The motifs set forth in Table 1 may not represent the entire RuvC-like and/or HNH domains as accepted in the art, but Table 1 does present motifs that can be used to help determine whether a given protein is a Cas9 protein.

TABLE 1
Table 1 lists 4 motifs that are present in Cas9 sequences from various
species. The amino acids listed in Table 1 are from the Cas9 from
S. pyogenes (SEQ ID NO: 5).

| Motif # | Motif | Amino acids (residue #s) | Highly conserved |
|---|---|---|---|
| 1 | RuvC-like I | IGLDIGTNSVGWAVI (7-21) | D10, G12, G17 |
| | | (SEQ ID NO: 1) | |
| 2 | RuvC-like II | IVIEMARE (759-766) | E762 |
| | | (SEQ ID NO: 2) | |
| 3 | HNH-motif | DVDHIVPQSFLKDDSIDNKVLTRSDKN | H840, N854, N863 |
| | | (837-863) (SEQ ID NO: 3) | |
| 4 | RuvC-like | HHAHDAYL (982-989) | H982, H983, A984, |
| | III | (SEQ ID NO: 4) | D986, A987 |

[0085] In some cases, a suitable Cas9 protein comprises an amino acid sequence having 4 motifs, each of motifs 1-4 having 60% or more, 70% or more, 75% or more, 80% or more, 85% or more, 90% or more, 95% or more, 99% or more or 100% amino acid sequence identity to motifs 1-4 as set forth in SEQ ID NOs: 1-4, respectively (e.g., see Table 1), or to the corresponding portions in any of the amino acid sequences set forth in SEQ ID NOs: 5-816.

[0086] In other words, in some cases, a suitable Cas9 polypeptide comprises an amino acid sequence having 4 motifs, each of motifs 1-4 having 60% or more, 70% or more, 75% or more, 80% or more, 85% or more, 90% or more, 95% or more, 99% or more or 100% amino acid sequence identity to motifs 1-4 of the Cas9 amino acid sequence set forth in SEQ ID NO: 5 (e.g., the sequences set forth in SEQ ID NOs: 1-4, e.g., see Table 1), or to the corresponding portions in any of the amino acid sequences set forth in SEQ ID NOs: 6-816.

[0087] In some cases, a suitable Cas9 protein comprises an amino acid sequence having 4 motifs, each of motifs 1-4 having 60% or more amino acid sequence identity to motifs 1-4 of the Cas9 amino acid sequence set forth as SEQ ID NO: 5 (the motifs are in Table 1, and are set forth as SEQ ID NOs: 1-4, respectively), or to the corresponding portions in any of the amino acid sequences set forth in SEQ ID NOs: 6-816. In some cases, a suitable Cas9 protein comprises an amino acid sequence having 4 motifs, each of motifs 1-4 having 70% or more amino acid sequence identity to motifs 1-4 of the Cas9 amino acid sequence set forth as SEQ ID NO: 5 (the motifs are in Table 1, and are set forth as SEQ ID NOs: 1-4, respectively), or to the corresponding portions in any of the amino acid sequences set forth in SEQ ID NOs: 6-816. In some cases, a suitable Cas9 protein comprises an amino acid sequence having 4 motifs, each of motifs 1-4 having 75% or more amino acid sequence identity to motifs 1-4 of the Cas9 amino acid sequence set forth as SEQ ID NO: 5 (the motifs are in Table 1, and are set forth as SEQ ID NOs: 1-4, respectively), or to the corresponding portions in any of the amino acid sequences set forth in SEQ ID NOs: 6-816. In some cases, a suitable Cas9 protein comprises an amino acid sequence having 4 motifs, each of motifs 1-4 having 80% or more amino acid sequence identity to motifs 1-4 of the Cas9 amino acid sequence set forth as SEQ ID NO: 5 (the motifs are in Table 1, and are set forth as SEQ ID NOs: 1-4, respectively), or to the corresponding portions in any of the amino acid sequences set forth in SEQ ID NOs: 6-816. In some cases, a suitable Cas9 protein comprises an amino acid sequence having 4 motifs, each of motifs 1-4 having 85% or more amino acid sequence identity to motifs 1-4 of the Cas9 amino acid sequence set forth as SEQ ID NO: 5 (the motifs are in Table 1, and are set forth as SEQ ID NOs: 1-4, respectively), or to the corresponding portions in any of the amino acid sequences set forth in SEQ ID NOs: 6-816. In some cases, a suitable Cas9 protein comprises an amino acid sequence having 4 motifs, each of motifs 1-4 having 90% or more amino acid sequence identity to motifs 1-4 of the Cas9 amino acid sequence set forth as SEQ ID NO: 5 (the motifs are in Table 1, and are set forth as SEQ ID NOs: 1-4, respectively), or to the corresponding portions in any of the amino acid sequences set forth in SEQ ID NOs: 6-816. In some cases, a suitable Cas9 protein comprises an amino acid sequence having 4 motifs, each of motifs 1-4 having 95% or more amino acid sequence identity to motifs 1-4 of the Cas9 amino acid sequence set forth as SEQ ID NO: 5 (the motifs are in Table 1, and are set forth as SEQ ID NOs: 1-4, respectively), or to the corresponding portions in any of the amino acid sequences set forth in SEQ ID NOs: 6-816. In some cases, a suitable Cas9 protein comprises an amino acid sequence having 4 motifs, each of motifs 1-4 having 99% or more amino acid sequence identity to motifs 1-4 of the Cas9 amino acid sequence set forth as SEQ ID NO: 5 (the motifs are in Table 1, and are set forth as SEQ ID NOs: 1-4, respectively), or to the corresponding portions in any of the amino acid sequences set forth in SEQ ID NOs: 6-816. In some cases, a suitable Cas9 protein comprises an amino acid sequence having 4 motifs, each of motifs 1-4 having 100% amino acid sequence identity to motifs 1-4 of the Cas9 amino acid sequence set forth as SEQ ID NO: 5 (the motifs are in Table 1, and are set forth as SEQ ID NOs: 1-4, respectively), or to the corresponding portions in any of the amino acid sequences set forth in SEQ ID NOs: 6-816. Any Cas9 protein as defined above can be used as a Cas9 polypeptide, as part of a chimeric Cas9 polypeptide (e.g., a Cas9 fusion protein), any of which can be used in an RNP of the present disclosure.

[0088] In some cases, a suitable Cas9 protein comprises an amino acid sequence having 60% or more, 70% or more, 75% or more, 80% or more, 85% or more, 90% or more, 95% or more, 99% or more or 100% amino acid sequence identity to amino acids 7-166 or 731-1003 of the Cas9 amino acid sequence set forth in SEQ ID NO: 5, or to the corresponding portions in any of the amino acid sequences set forth as SEQ ID NOs: 6-816.

[0089] In some cases, a suitable Cas9 protein comprises an amino acid sequence having 60% or more amino acid sequence identity to amino acids 7-166 or 731-1003 of the Cas9 amino acid sequence set forth in SEQ ID NO: 5, or to the corresponding portions in any of the amino acid sequences set forth as SEQ ID NOs: 6-816. In some cases, a suitable Cas9 protein comprises an amino acid sequence having 70% or more amino acid sequence identity to amino acids 7-166 or 731-1003 of the Cas9 amino acid sequence set forth in SEQ ID NO: 5, or to the corresponding portions in any of the amino acid sequences set forth as SEQ ID NOs: 6-816. In some cases, a suitable Cas9 protein comprises an amino acid sequence having 75% or more amino acid sequence identity to amino acids 7-166 or 731-1003 of the Cas9 amino acid sequence set forth in SEQ ID NO: 5, or to the corresponding portions in any of the amino acid sequences set forth as SEQ ID NOs: 6-816. In some cases, a suitable Cas9 protein comprises an amino acid sequence having 80% or more amino acid sequence identity to amino acids 7-166 or 731-1003 of the Cas9 amino acid sequence set forth in SEQ ID NO: 5, or to the corresponding portions in any of the amino acid sequences set forth as SEQ ID NOs: 6-816. In some cases, a suitable Cas9 protein comprises an amino acid sequence having 85% or more amino acid sequence identity to amino acids 7-166 or 731-1003 of the Cas9 amino acid sequence set forth in SEQ ID NO: 5, or to the corresponding portions in any of the amino acid sequences set forth as SEQ ID NOs: 6-816. In some cases, a suitable Cas9 protein comprises an amino acid sequence having 90% or more amino acid sequence identity to amino acids 7-166 or 731-1003 of the Cas9 amino acid sequence set forth in SEQ ID NO: 5, or to the corresponding portions in any of the amino acid sequences set forth as SEQ ID NOs: 6-816. In some cases, a suitable Cas9 protein comprises an amino acid sequence having 95% or more amino acid sequence identity to amino acids 7-166 or 731-1003 of the Cas9 amino acid sequence set forth in SEQ ID NO: 5, or to the corresponding portions in any of the amino acid sequences set forth as SEQ ID NOs: 6-816. In some cases, a suitable Cas9 protein comprises an amino acid sequence having 99% or more amino acid sequence identity to amino acids 7-166 or 731-1003 of the Cas9 amino acid sequence set forth in SEQ ID NO: 5, or to the corresponding portions in any of the amino acid sequences set forth as SEQ ID NOs: 6-816. In some cases, a suitable Cas9 protein comprises an amino acid sequence having 100% amino acid sequence identity to amino acids 7-166 or 731-1003 of the Cas9 amino acid sequence set forth in SEQ ID NO: 5, or to the corresponding portions in any of the amino acid sequences set forth as SEQ ID NOs: 6-816. Any Cas9 protein as defined above can be used as a Cas9 polypeptide, as part of a chimeric Cas9 polypeptide (e.g., a Cas9 fusion protein), any of which can be used in an RNP of the present disclosure.

[0090] In some cases, a suitable Cas9 protein comprises an amino acid sequence having 60% or more, 70% or more, 75% or more, 80% or more, 85% or more, 90% or more, 95% or more, 99% or more or 100% amino acid sequence identity to the Cas9 amino acid sequence set forth in SEQ ID NO: 5, or to any of the amino acid sequences set forth as SEQ ID NOs: 6-816.

[0091] In some cases, a suitable Cas9 protein comprises an amino acid sequence having 60% or more amino acid sequence identity to the Cas9 amino acid sequence set forth in SEQ ID NO: 5, or to any of the amino acid sequences set forth as SEQ ID NOs: 6-816. In some cases, a suitable Cas9 protein comprises an amino acid sequence having 70% or more amino acid sequence identity to the Cas9 amino acid sequence set forth in SEQ ID NO: 5, or to any of the amino acid sequences set forth as SEQ ID NOs: 6-816. In some cases, a suitable Cas9 protein comprises an amino acid sequence having 75% or more amino acid sequence identity to the Cas9 amino acid sequence set forth in SEQ ID NO: 5, or to any of the amino acid sequences set forth as SEQ ID NOs: 6-816. In some cases, a suitable Cas9 protein comprises an amino acid sequence having 80% or more amino acid sequence identity to the Cas9 amino acid sequence set forth in SEQ ID NO: 5, or to any of the amino acid sequences set forth as SEQ ID NOs: 6-816. In some cases, a suitable Cas9 protein comprises an amino acid sequence having 85% or more amino acid sequence identity to the Cas9 amino acid sequence set forth in SEQ ID NO: 5, or to any of the amino acid sequences set forth as SEQ ID NOs: 6-816. In some cases, a suitable Cas9 protein comprises an amino acid sequence having 90% or more amino acid sequence identity to the Cas9 amino acid sequence set forth in SEQ ID NO: 5, or to any of the amino acid sequences set forth as SEQ ID NOs: 6-816. In some cases, a suitable Cas9 protein comprises an amino acid sequence having 95% or more amino acid sequence identity to the Cas9 amino acid sequence set forth in SEQ ID NO: 5, or to any of the amino acid sequences set forth as SEQ ID NOs: 6-816. In some cases, a suitable Cas9 protein comprises an amino acid sequence having 99% or more amino acid sequence identity to the Cas9 amino acid sequence set forth in SEQ ID NO: 5, or to any of the amino acid sequences set forth as SEQ ID NOs: 6-816. In some cases, a suitable Cas9 protein comprises an amino acid sequence having 100% amino acid sequence identity to the Cas9 amino acid sequence set forth in SEQ ID NO: 5, or to any of the amino acid sequences set forth as SEQ ID NOs: 6-816. Any Cas9 protein as defined above can be used as a Cas9 polypeptide, as part of a chimeric Cas9 polypeptide (e.g., a Cas9 fusion protein), any of which can be used in an RNP of the present disclosure.

[0092] In some cases, a Cas9 protein comprises 4 motifs (as listed in Table 1), at least one with (or each with) amino acid sequences having 75% or more, 80% or more, 85% or more, 90% or more, 95% or more, 99% or more or 100% amino acid sequence identity to each of the 4 motifs listed in Table 1 (SEQ ID NOs:1-4), or to the corresponding portions in any of the amino acid sequences set forth as SEQ ID NOs: 6-816.

[0093] Examples of various Cas9 proteins (and Cas9 domain structure) and Cas9 guide RNAs (as well as information regarding requirements related to protospacer adjacent motif (PAM) sequences present in targeted nucleic acids) can be found in the art, for example, see Jinek et al., Science. 2012 Aug. 17; 337(6096):816-21; Chylinski et al., RNA Biol. 2013 May; 10(5):726-37; Ma et al., Biomed Res Int. 2013; 2013:270805; Hou et al., Proc Natl Acad Sci USA. 2013 Sep. 24; 110(39):15644-9; Jinek et al., Elife. 2013; 2:e00471; Pattanayak et al., Nat Biotechnol. 2013 September; 31(9):839-43; Qi et al., Cell. 2013 Feb. 28; 152(5):1173-83; Wang et al., Cell. 2013 May 9; 153(4):910-8; Auer et al., Genome Res. 2013 Oct. 31; Chen et al., Nucleic Acids Res. 2013 Nov. 1; 41(20):e19; Cheng et al., Cell Res. 2013 October; 23(10):1163-71; Cho et al., Genetics. 2013 November; 195(3):1177-80; DiCarlo et al., Nucleic Acids Res. 2013 April; 41(7):4336-43; Dickinson et al., Nat Methods. 2013 October; 10(10):1028-34; Ebina et al., Sci Rep. 2013; 3:2510; Fujii et al., Nucleic Acids Res. 2013 Nov. 1; 41(20):e187; Hu et al., Cell Res. 2013 November; 23(11):1322-5; Jiang et al., Nucleic Acids Res. 2013 Nov. 1; 41(20):e188; Larson et al., Nat Protoc. 2013 November; 8(11):2180-96; Mali et al., Nat Methods. 2013 October; 10(10):957-63; Nakayama et al., Genesis. 2013 December; 51(12):835-43; Ran et al., Nat Protoc. 2013 November; 8(11):2281-308; Ran et al., Cell. 2013 Sep. 12; 154(6):1380-9; Upadhyay et al., G3 (Bethesda). 2013 Dec. 9; 3(12):2233-8; Walsh et al., Proc Natl Acad Sci USA. 2013 Sep. 24; 110(39):15514-5; Xie et al., Mol Plant. 2013 Oct. 9; Yang et al., Cell. 2013 Sep. 12; 154(6):1370-9; Briner et al., Mol Cell. 2014 Oct. 23; 56(2):333-9; Shmakov et al, Nat Rev Microbiol. 2017 March; 15(3):169-182; and U.S. patents and patent applications: U.S. Pat. Nos. 8,906,616; 8,895,308; 8,889,418; 8,889,356; 8,871,445; 8,865,406; 8,795,965; 8,771,945; 8,697,359; 20140068797; 20140170753; 20140179006; 20140179770; 20140186843; 20140186919; 20140186958; 20140189896; 20140227787; 20140234972; 20140242664; 20140242699; 20140242700; 20140242702; 20140248702; 20140256046; 20140273037; 20140273226; 20140273230; 20140273231; 20140273232; 20140273233; 20140273234; 20140273235; 20140287938; 20140295556; 20140295557; 20140298547; 20140304853; 20140309487; 20140310828; 20140310830; 20140315985; 20140335063; 20140335620; 20140342456; 20140342457; 20140342458; 20140349400; 20140349405; 20140356867; 20140356956; 20140356958; 20140356959; 20140357523; 20140357530; 20140364333; and 20140377868; each of which is hereby incorporated by reference in its entirety.

Variant Cas9 Proteins—Nickases and dCas9

[0094] In some cases, a Cas9 protein is a variant Cas9 protein. A variant Cas9 protein has an amino acid sequence that is different by at least one amino acid (e.g., has a deletion, insertion, substitution, fusion) when compared to the amino acid sequence of a corresponding wild type Cas9 protein. In some instances, the variant Cas9 protein has an amino acid change (e.g., deletion, insertion, or substitution) that reduces the nuclease activity of the Cas9 protein. For example, in some instances, the variant Cas9 protein has 50% or less, 40% or less, 30% or less, 20% or less, 10% or less, 5% or less, or 1% or less of the nuclease activity of the corresponding wild-type Cas9 protein. In some cases, the variant Cas9 protein has no substantial nuclease activity. When a Cas9 protein is a variant Cas9 protein that has no substantial nuclease activity, it can be referred to as a nuclease defective Cas9 protein or “dCas9” for “dead” Cas9. A protein (e.g., a class 2 CRISPR/Cas protein, e.g., a Cas9 protein) that cleaves one strand but not the other of a double stranded target nucleic acid is referred to herein as a “nickase” (e.g., a “nickase Cas9”).

[0095] In some cases, a variant Cas9 protein can cleave the complementary strand (sometimes referred to in the art as the target strand) of a target nucleic acid but has reduced ability to cleave the non-complementary strand (sometimes referred to in the art as the non-target strand) of a target nucleic acid. For example, the variant Cas9 protein can have a mutation (amino acid substitution) that reduces the function of the RuvC domain. Thus, the Cas9 protein can be a nickase that cleaves the complementary strand, but does not cleave the non-complementary strand. As a non-limiting example, in some embodiments, a variant Cas9 protein has a mutation at an amino acid position corresponding to residue D10 (e.g., D10A, aspartate to alanine) of SEQ ID NO: 5 (or the corresponding position of any of the proteins set forth in SEQ ID NOs: 6-261 and 264-816) and can therefore cleave the complementary strand of a double stranded target nucleic acid but has reduced ability to cleave the non-complementary strand of a double stranded target nucleic acid (thus resulting in a single strand break (SSB) instead of a double strand break (DSB) when the variant Cas9 protein cleaves a double stranded target nucleic acid) (see, for example, Jinek et al., Science. 2012 Aug. 17; 337(6096):816-21). See, e.g., SEQ ID NO: 262. In some cases, a variant Cas9 protein comprises the amino acid sequence depicted in FIG. 3B. In some cases, a variant Cas9 protein comprises the amino acid sequence depicted in FIG. 3C. In some cases, a variant Cas9 protein comprises the amino acid sequence depicted in FIG. 3D.

[0096] In some cases, a variant Cas9 protein can cleave the non-complementary strand of a target nucleic acid but has reduced ability to cleave the complementary strand of the target nucleic acid. For example, the variant Cas9 protein can have a mutation (amino acid substitution) that reduces the function of the HNH domain. Thus, the Cas9 protein can be a nickase that cleaves the non-complementary strand, but does not cleave the complementary strand. As a non-limiting example, in some embodiments, the variant Cas9 protein has a mutation at an amino acid position corresponding to residue H840 (e.g., an H840A mutation, histidine to alanine) of SEQ ID NO: 5 (or the corresponding position of any of the proteins set forth as SEQ ID NOs: 6-261 and 264-816) and can therefore cleave the non-complementary strand of the target nucleic acid but has reduced ability to cleave (e.g., does not cleave) the complementary strand of the target nucleic acid. Such a Cas9 protein has a reduced ability to cleave a target nucleic acid (e.g., a single stranded target nucleic acid) but retains the ability to bind a target nucleic acid (e.g., a single stranded target nucleic acid). See, e.g., SEQ ID NO: 263.

[0097] In some cases, a variant Cas9 protein has a reduced ability to cleave both the complementary and the non-complementary strands of a double stranded target nucleic acid. As a non-limiting example, in some cases, the variant Cas9 protein harbors mutations at amino acid positions corresponding to residues D10 and H840 (e.g., D10A and H840A) of SEQ ID NO: 5 (or the corresponding residues of any of the proteins set forth as SEQ ID NOs: 6-261 and 264-816) such that the polypeptide has a reduced ability to cleave (e.g., does not cleave) both the complementary and the non-complementary strands of a target nucleic acid. Such a Cas9 protein has a reduced ability to cleave a target nucleic acid (e.g., a single stranded or double stranded target nucleic acid) but retains the ability to bind a target nucleic acid. A Cas9 protein that cannot cleave target nucleic acid (e.g., due to one or more mutations, e.g., in the catalytic domains of the RuvC and HNH domains) is referred to as a “dead” Cas9 or simply “dCas9.” See, e.g., SEQ ID NO: 264.

[0098] Other residues can be mutated to achieve the above effects (i.e. inactivate one or the other nuclease portions). As non-limiting examples, residues D10, G12, G17, E762, H840, N854, N863, H982, H983, A984, D986, and/or A987 of SEQ ID NO: 5 (or the corresponding mutations of any of the proteins set forth as SEQ ID NOs: 6-816) can be altered (i.e., substituted). Also, mutations other than alanine substitutions are suitable.

[0099] In some embodiments, a variant Cas9 protein that has reduced catalytic activity (e.g., when a Cas9 protein has a D10, G12, G17, E762, H840, N854, N863, H982, H983, A984, D986, and/or a A987 mutation of SEQ ID NO: 5 or the corresponding mutations of any of the proteins set forth as SEQ ID NOs: 6-816, e.g., D10A, G12A, G17A, E762A, H840A, N854A, N863A, H982A, H983A, A984A, and/or D986A), the variant Cas9 protein can still bind to target nucleic acid in a site-specific manner (because it is still guided to a target nucleic acid sequence by a Cas9 guide RNA) as long as it retains the ability to interact with the Cas9 guide RNA.

[0100] In addition to the above, a variant Cas9 protein can have the same parameters for sequence identity as described above for Cas9 proteins. Thus, in some cases, a suitable variant Cas9 protein comprises an amino acid sequence having 4 motifs, each of motifs 1-4 having 60% or more, 70% or more, 75% or more, 80% or more, 85% or more, 90% or more, 95% or more, 99% or more or 100% amino acid sequence identity to motifs 1-4 of the Cas9 amino acid sequence set forth as SEQ ID NO: 5 (the motifs are in Table 1, above, and are set forth as SEQ ID NOs: 1-4, respectively), or to the corresponding portions in any of the amino acid sequences set forth in SEQ ID NOs: 6-816.

[0101] In some cases, a suitable variant Cas9 protein comprises an amino acid sequence having 4 motifs, each of motifs 1-4 having 60% or more amino acid sequence identity to motifs 1-4 of the Cas9 amino acid sequence set forth as SEQ ID NO: 5 (the motifs are in Table 1, above, and are set forth as SEQ ID NOs: 1-4, respectively), or to the corresponding portions in any of the amino acid sequences set forth in SEQ ID NOs: 6-816. In some cases, a suitable variant Cas9 protein comprises an amino acid sequence having 4 motifs, each of motifs 1-4 having 70% or more amino acid sequence identity to motifs 1-4 of the Cas9 amino acid sequence set forth as SEQ ID NO: 5 (the motifs are in Table 1, above, and are set forth as SEQ ID NOs: 1-4, respectively), or to the corresponding portions in any of the amino acid sequences set forth in SEQ ID NOs: 6-816. In some cases, a suitable variant Cas9 protein comprises an amino acid sequence having 4 motifs, each of motifs 1-4 having 75% or more amino acid sequence identity to motifs 1-4 of the Cas9 amino acid sequence set forth as SEQ ID NO: 5 (the motifs are in Table 1, above, and are set forth as SEQ ID NOs: 1-4, respectively), or to the corresponding portions in any of the amino acid sequences set forth in SEQ ID NOs: 6-816. In some cases, a suitable variant Cas9 protein comprises an amino acid sequence having 4 motifs, each of motifs 1-4 having 80% or more amino acid sequence identity to motifs 1-4 of the Cas9 amino acid sequence set forth as SEQ ID NO: 5 (the motifs are in Table 1, above, and are set forth as SEQ ID NOs: 1-4, respectively), or to the corresponding portions in any of the amino acid sequences set forth in SEQ ID NOs: 6-816. In some cases, a suitable variant Cas9 protein comprises an amino acid sequence having 4 motifs, each of motifs 1-4 having 85% or more amino acid sequence identity to motifs 1-4 of the Cas9 amino acid sequence set forth as SEQ ID NO: 5 (the motifs are in Table 1, above, and are set forth as SEQ ID NOs: 1-4, respectively), or to the corresponding portions in any of the amino acid sequences set forth in SEQ ID NOs: 6-816. In some cases, a suitable variant Cas9 protein comprises an amino acid sequence having 4 motifs, each of motifs 1-4 having 90% or more amino acid sequence identity to motifs 1-4 of the Cas9 amino acid sequence set forth as SEQ ID NO: 5 (the motifs are in Table 1, above, and are set forth as SEQ ID NOs: 1-4, respectively), or to the corresponding portions in any of the amino acid sequences set forth in SEQ ID NOs: 6-816. In some cases, a suitable variant Cas9 protein comprises an amino acid sequence having 4 motifs, each of motifs 1-4 having 95% or more amino acid sequence identity to motifs 1-4 of the Cas9 amino acid sequence set forth as SEQ ID NO: 5 (the motifs are in Table 1, above, and are set forth as SEQ ID NOs: 1-4, respectively), or to the corresponding portions in any of the amino acid sequences set forth in SEQ ID NOs: 6-816. In some cases, a suitable variant Cas9 protein comprises an amino acid sequence having 4 motifs, each of motifs 1-4 having 99% or more amino acid sequence identity to motifs 1-4 of the Cas9 amino acid sequence set forth as SEQ ID NO: 5 (the motifs are in Table 1, above, and are set forth as SEQ ID NOs: 1-4, respectively), or to the corresponding portions in any of the amino acid sequences set forth in SEQ ID NOs: 6-816. In some cases, a suitable variant Cas9 protein comprises an amino acid sequence having 4 motifs, each of motifs 1-4 having 100% amino acid sequence identity to motifs 1-4 of the Cas9 amino acid sequence set forth as SEQ ID NO: 5 (the motifs are in Table 1, above, and are set forth as SEQ ID NOs: 1-4, respectively), or to the corresponding portions in any of the amino acid sequences set forth in SEQ ID NOs: 6-816.

[0102] In some cases, a suitable variant Cas9 protein comprises an amino acid sequence having 60% or more, 70% or more, 75% or more, 80% or more, 85% or more, 90% or more, 95% or more, 99% or more, or 100% amino acid sequence identity to amino acids 7-166 or 731-1003 of the Cas9 amino acid sequence set forth in SEQ ID NO: 5, or to the corresponding portions in any of the amino acid sequences set forth as SEQ ID NOs: 6-816.

[0103] In some cases, a suitable variant Cas9 protein comprises an amino acid sequence having 60% or more amino acid sequence identity to amino acids 7-166 or 731-1003 of the Cas9 amino acid sequence set forth in SEQ ID NO: 5, or to the corresponding portions in any of the amino acid sequences set forth as SEQ ID NOs: 6-816. In some cases, a suitable variant Cas9 protein comprises an amino acid sequence having 70% or more amino acid sequence identity to amino acids 7-166 or 731-1003 of the Cas9 amino acid sequence set forth in SEQ ID NO: 5, or to the corresponding portions in any of the amino acid sequences set forth as SEQ ID NOs: 6-816. In some cases, a suitable variant Cas9 protein comprises an amino acid sequence having 75% or more amino acid sequence identity to amino acids 7-166 or 731-1003 of the Cas9 amino acid sequence set forth in SEQ ID NO: 5, or to the corresponding portions in any of the amino acid sequences set forth as SEQ ID NOs: 6-816. In some cases, a suitable variant Cas9 protein comprises an amino acid sequence having 80% or more amino acid sequence identity to amino acids 7-166 or 731-1003 of the Cas9 amino acid sequence set forth in SEQ ID NO: 5, or to the corresponding portions in any of the amino acid sequences set forth as SEQ ID NOs: 6-816. In some cases, a suitable variant Cas9 protein comprises an amino acid sequence having 85% or more amino acid sequence identity to amino acids 7-166 or 731-1003 of the Cas9 amino acid sequence set forth in SEQ ID NO: 5, or to the corresponding portions in any of the amino acid sequences set forth as SEQ ID NOs: 6-816. In some cases, a suitable variant Cas9 protein comprises an amino acid sequence having 90% or more amino acid sequence identity to amino acids 7-166 or 731-1003 of the Cas9 amino acid sequence set forth in SEQ ID NO: 5, or to the corresponding portions in any of the amino acid sequences set forth as SEQ ID NOs: 6-816. In some cases, a suitable variant Cas9 protein comprises an amino acid sequence having 95% or more amino acid sequence identity to amino acids 7-166 or 731-1003 of the Cas9 amino acid sequence set forth in SEQ ID NO: 5, or to the corresponding portions in any of the amino acid sequences set forth as SEQ ID NOs: 6-816. In some cases, a suitable variant Cas9 protein comprises an amino acid sequence having 99% or more amino acid sequence identity to amino acids 7-166 or 731-1003 of the Cas9 amino acid sequence set forth in SEQ ID NO: 5, or to the corresponding portions in any of the amino acid sequences set forth as SEQ ID NOs: 6-816. In some cases, a suitable variant Cas9 protein comprises an amino acid sequence having 100% amino acid sequence identity to amino acids 7-166 or 731-1003 of the Cas9 amino acid sequence set forth in SEQ ID NO: 5, or to the corresponding portions in any of the amino acid sequences set forth as SEQ ID NOs: 6-816.

[0104] In some cases, a suitable variant Cas9 protein comprises an amino acid sequence having 60% or more, 70% or more, 75% or more, 80% or more, 85% or more, 90% or more, 95% or more, 99% or more, or 100% amino acid sequence identity to the Cas9 amino acid sequence set forth in SEQ ID NO: 5, or to any of the amino acid sequences set forth as SEQ ID NOs: 6-816. In some cases, a suitable variant Cas9 protein comprises an amino acid sequence having 60% or more amino acid sequence identity to the Cas9 amino acid sequence set forth in SEQ ID NO: 5, or to any of the amino acid sequences set forth as SEQ ID NOs: 6-816. In some cases, a suitable variant Cas9 protein comprises an amino acid sequence having 70% or more amino acid sequence identity to the Cas9 amino acid sequence set forth in SEQ ID NO: 5, or to any of the amino acid sequences set forth as SEQ ID NOs: 6-816. In some cases, a suitable variant Cas9 protein comprises an amino acid sequence having 75% or more amino acid sequence identity to the Cas9 amino acid sequence set forth in SEQ ID NO: 5, or to any of the amino acid sequences set forth as SEQ ID NOs: 6-816. In some cases, a suitable variant Cas9 protein comprises an amino acid sequence having 80% or more amino acid sequence identity to the Cas9 amino acid sequence set forth in SEQ ID NO: 5, or to any of the amino acid sequences set forth as SEQ ID NOs: 6-816. In some cases, a suitable variant Cas9 protein comprises an amino acid sequence having 85% or more amino acid sequence identity to the Cas9 amino acid sequence set forth in SEQ ID NO: 5, or to any of the amino acid sequences set forth as SEQ ID NOs: 6-816. In some cases, a suitable variant Cas9 protein comprises an amino acid sequence having 90% or more amino acid sequence identity to the Cas9 amino acid sequence set forth in SEQ ID NO: 5, or to any of the amino acid sequences set forth as SEQ ID NOs: 6-816. In some cases, a suitable variant Cas9 protein comprises an amino acid sequence having 95% or more amino acid sequence identity to the Cas9 amino acid sequence set forth in SEQ ID NO: 5, or to any of the amino acid sequences set forth as SEQ ID NOs: 6-816. In some cases, a suitable variant Cas9 protein comprises an amino acid sequence having 99% or more amino acid sequence identity to the Cas9 amino acid sequence set forth in SEQ ID NO: 5, or to any of the amino acid sequences set forth as SEQ ID NOs: 6-816. In some cases, a suitable variant Cas9 protein comprises an amino acid sequence having 100% amino acid sequence identity to the Cas9 amino acid sequence set forth in SEQ ID NO: 5, or to any of the amino acid sequences set forth as SEQ ID NOs: 6-816.

### Type V and Type VI CRISPR/Cas Endonucleases

[0105] In some cases, a genome targeting composition of the present disclosure includes a type V or type VI CRISPR/Cas endonuclease (i.e., the genome editing endonuclease is a type V or type VI CRISPR/Cas endonuclease) (e.g., Cpf1, C2c1, C2c2, C2c3). Type V and type VI CRISPR/Cas endonucleases are a type of class 2 CRISPR/Cas endonuclease. Examples of type V CRISPR/Cas endonucleases include but are not limited to: Cpf1, C2c1, and C2c3. An example of a type VI CRISPR/Cas endonuclease is C2c2. In some cases, a subject genome targeting composition includes a type V CRISPR/Cas endonuclease (e.g., Cpf1, C2c1, C2c3). In some cases, a Type V CRISPR/Cas endonuclease is a Cpf1 protein. In some cases, a subject genome targeting composition includes a type VI CRISPR/Cas endonuclease (e.g., Cas13a).

[0106] Like type II CRISPR/Cas endonucleases, type V and VI CRISPR/Cas endonucleases form a complex with a corresponding guide RNA. The guide RNA provides target specificity to an endonuclease-guide RNA RNP complex by having a nucleotide sequence (a guide sequence) that is complementary to a sequence (the target site) of a target nucleic acid (as described elsewhere herein). The endonuclease of the complex provides the site-specific activity. In other words, the endonuclease is guided to a target site (e.g., stabilized at a target site) within a target nucleic acid sequence (e.g. a chromosomal sequence or an extrachromosomal sequence, e.g., an episomal sequence, a minicircle sequence, a mitochondrial sequence, a chloroplast sequence, etc.) by virtue of its association with the protein-binding segment of the guide RNA.

[0107] Examples and guidance related to type V and type VI CRISPR/Cas proteins (e.g., Cpf1, C2c1, C2c2, and C2c3 guide RNAs) can be found in the art, for example, see Zetsche et al., Cell. 2015 Oct. 22; 163(3):759-71; Makarova et al., Nat Rev Microbiol. 2015 November; 13(11):722-36; Shmakov et al., Mol Cell. 2015 Nov. 5; 60(3):385-97; and Shmakov et al. (2017) Nature Reviews Microbiology 15:169.

[0108] In some cases, the Type V or type VI CRISPR/Cas endonuclease (e.g., Cpf1, C2c1, C2c2, C2c3) is enzymatically active, e.g., the Type V or type VI CRISPR/Cas polypeptide, when bound to a guide RNA, cleaves a target nucleic acid. In some cases, the Type V or type VI CRISPR/Cas endonuclease (e.g., Cpf1, C2c1, C2c2, C2c3) exhibits reduced enzymatic activity relative to a corresponding wild-type a Type V or type VI CRISPR/Cas endonuclease (e.g., Cpf1, C2c1, C2c2, C2c3), and retains DNA binding activity.

[0109] In some cases a type V CRISPR/Cas endonuclease is a Cpf1 protein. In some cases, a Cpf1 protein comprises an amino acid sequence having at least 30%, at least 35%, at least 40%, at least 45%, at least 50%, at least 55%, at least 60%, at least 65%, at least 70%, at least 75%, at least 80%, at least 85%, at least 90%, at least 95%, at least 90%, or 100%, amino acid sequence identity to the Cpf1 amino acid sequence set forth in any of SEQ ID NOs: 818-822. In some cases, a Cpf1 protein comprises an amino acid sequence having at least 30%, at least 35%, at least 40%, at least 45%, at least 50%, at least 55%, at least 60%, at least 65%, at least 70%, at least 75%, at least 80%, at least 85%, at least 90%, at least 95%, at least 90%, or 100%, amino acid sequence identity to a contiguous stretch of from 100 amino acids to 200 amino acids (aa), from 200 aa to 400 aa, from 400 aa to 600 aa, from 600 aa to 800 aa, from 800 aa to 1000 aa, from 1000 aa to 1100 aa, from 1100 aa to 1200 aa, or from 1200 aa to 1300 aa, of the Cpf1 amino acid sequence set forth in any of SEQ ID NOs:818-822.

[0110] In some cases, a Cpf1 protein comprises an amino acid sequence having at least 30%, at least 35%, at least 40%, at least 45%, at least 50%, at least 55%, at least 60%, at least 65%, at least 70%, at least 75%, at least 80%, at least 85%, at least 90%, at least 95%, at least 90%, or 100%, amino acid sequence identity to the RuvCI domain of the Cpf1 amino acid sequence set forth in any of SEQ ID NOs: 818-822. In some cases, a Cpf1 protein comprises an amino acid sequence having at least 30%, at least 35%, at least 40%, at least 45%, at least 50%, at least 55%, at least 60%, at least 65%, at least 70%, at least 75%, at least 80%, at least 85%, at least 90%, at least 95%, at least 90%, or 100%, amino acid sequence identity to the RuvCII domain of the Cpf1 amino acid sequence set forth in any of SEQ ID NOs: 818-822. In some cases, a Cpf1 protein comprises an amino acid sequence having at least 30%, at least 35%, at least 40%, at least 45%, at least 50%, at least 55%, at least 60%, at least 65%, at least 70%, at least 75%, at least 80%, at least 85%, at least 90%, at least 95%, at least 90%, or 100%, amino acid sequence identity to the RuvCIII domain of the Cpf1 amino acid sequence set forth in any of SEQ ID NOs: 818-822. In some cases, a Cpf1 protein comprises an amino acid sequence having at least 30%, at least 35%, at least 40%, at least 45%, at least 50%, at least 55%, at least 60%, at least 65%, at least 70%, at least 75%, at least 80%, at least 85%, at least 90%, at least 95%, at least 90%, or 100%, amino acid sequence identity to the RuvCI, RuvCII, and RuvCIII domains of the Cpf1 amino acid sequence set forth in any of SEQ ID NOs: 818-822.

[0111] In some cases, the Cpf1 protein exhibits reduced enzymatic activity relative to a wild-type Cpf1 protein (e.g., relative to a Cpf1 protein comprising the amino acid sequence set forth in any of SEQ ID NOs: 818-822), and retains DNA binding activity. In some cases, a Cpf1 protein comprises an amino acid sequence having at least 30%, at least 35%, at least 40%, at least 45%, at least 50%, at least 55%, at least 60%, at least 65%, at least 70%, at least 75%, at least 80%, at least 85%, at least 90%, at least 95%, at least 90%, or 100%, amino acid sequence identity to the Cpf1 amino acid sequence set forth in any of SEQ ID NOs: 818-822; and comprises an amino acid substitution (e.g., a D→A substitution) at an amino acid residue corresponding to amino acid 917 of the Cpf1 amino acid sequence set forth in SEQ ID NO: 818. In some cases, a Cpf1 protein comprises an amino acid sequence having at least 30%, at least 35%, at least 40%, at least 45%, at least 50%, at least 55%, at least 60%, at least 65%, at least 70%, at least 75%, at least 80%, at least 85%, at least 90%, at least 95%, at least 90%, or 100%, amino acid sequence identity to the Cpf1 amino acid sequence set forth in any of SEQ ID NOs: 818-822; and comprises an amino acid substitution (e.g., an E→A substitution) at an amino acid residue corresponding to amino acid 1006 of the Cpf1 amino acid sequence set forth in SEQ ID NO: 818. In some cases, a Cpf1 protein comprises an amino acid sequence having at least 30%, at least 35%, at least 40%, at least 45%, at least 50%, at least 55%, at least 60%, at least 65%, at least 70%, at least 75%, at least 80%, at least 85%, at least 90%, at least 95%, at least 90%, or 100%, amino acid sequence identity to the Cpf1 amino acid sequence set forth in any of SEQ ID NOs: 818-822; and comprises an amino acid substitution (e.g., a D→A substitution) at an amino acid residue corresponding to amino acid 1255 of the Cpf1 amino acid sequence set forth in SEQ ID NO: 818.

[0112] In some cases, a suitable Cpf1 protein comprises an amino acid sequence having at least 30%, at least 35%, at least 40%, at least 45%, at least 50%, at least 55%, at least 60%, at least 65%, at least 70%, at least 75%, at least 80%, at least 85%, at least 90%, at least 95%, at least 90%, or 100%, amino acid sequence identity to the Cpf1 amino acid sequence set forth in any of SEQ ID NOs: 818-822.

[0113] In some cases a type V CRISPR/Cas endonuclease is a C2c1 protein (examples include those set forth as SEQ ID NOs: 823-830). In some cases, a C2c1 protein comprises an amino acid sequence having at least 30%, at least 35%, at least 40%, at least 45%, at least 50%, at least 55%, at least 60%, at least 65%, at least 70%, at least 75%, at least 80%, at least 85%, at least 90%, at least 95%, at least 90%, or 100%, amino acid sequence identity to the C2c1 amino acid sequence set forth in any of SEQ ID NOs: 823-830. In some cases, a C2c1 protein comprises an amino acid sequence having at least 30%, at least 35%, at least 40%, at least 45%, at least 50%, at least 55%, at least 60%, at least 65%, at least 70%, at least 75%, at least 80%, at least 85%, at least 90%, at least 95%, at least 90%, or 100%, amino acid sequence identity to a contiguous stretch of from 100 amino acids to 200 amino acids (aa), from 200 aa to 400 aa, from 400 aa to 600 aa, from 600 aa to 800 aa, from 800 aa to 1000 aa, from 1000 aa to 1100 aa, from 1100 aa to 1200 aa, or from 1200 aa to 1300 aa, of the C2c1 amino acid sequence set forth in any of SEQ ID NOs: 823-830.

[0114] In some cases, a C2c1 protein comprises an amino acid sequence having at least 30%, at least 35%, at least 40%, at least 45%, at least 50%, at least 55%, at least 60%, at least 65%, at least 70%, at least 75%, at least 80%, at least 85%, at least 90%, at least 95%, at least 90%, or 100%, amino acid sequence identity to the RuvCI domain of the C2c1 amino acid sequences set forth in any of SEQ ID NOs: 823-830). In some cases, a C2c1 protein comprises an amino acid sequence having at least 30%, at least 35%, at least 40%, at least 45%, at least 50%, at least 55%, at least 60%, at least 65%, at least 70%, at least 75%, at least 80%, at least 85%, at least 90%, at least 95%, at least 90%, or 100%, amino acid sequence identity to the RuvCII domain of the C2c1 amino acid sequence set forth in any of SEQ ID NOs: 823-830. In some cases, a C2c1 protein comprises an amino acid sequence having at least 30%, at least 35%, at least 40%, at least 45%, at least 50%, at least 55%, at least 60%, at least 65%, at least 70%, at least 75%, at least 80%, at least 85%, at least 90%, at least 95%, at least 90%, or 100%, amino acid sequence identity to the RuvCIII domain of the C2c1 amino acid sequence set forth in any of SEQ ID NOs: 823-830. In some cases, a C2c1 protein comprises an amino acid sequence having at least 30%, at least 35%, at least 40%, at least 45%, at least 50%, at least 55%, at least 60%, at least 65%, at least 70%, at least 75%, at least 80%, at least 85%, at least 90%, at least 95%, at least 90%, or 100%, amino acid sequence identity to the RuvCI, RuvCII, and RuvCIII domains of the C2c1 amino acid sequence set forth in any of SEQ ID NOs: 823-830.

[0115] In some cases, the C2c1 protein exhibits reduced enzymatic activity relative to a wild-type C2c1 protein (e.g., relative to a C2c1 protein comprising the amino acid sequence set forth in any of SEQ ID NOs: 823-830), and retains DNA binding activity. In some cases, a suitable C2c1 protein comprises an amino acid sequence having at least 30%, at least 35%, at least 40%, at least 45%, at least 50%, at least 55%, at least 60%, at least 65%, at least 70%, at least 75%, at least 80%, at least 85%, at least 90%, at least 95%, at least 90%, or 100%, amino acid sequence identity to the C2c1 amino acid sequence set forth in any of SEQ ID NOs: 823-830.

[0116] In some cases a type V CRISPR/Cas endonuclease is a C2c3 protein (examples include those set forth as SEQ ID NOs: 831-834). In some cases, a C2c3 protein comprises an amino acid sequence having at least 30%, at least 35%, at least 40%, at least 45%, at least 50%, at least 55%, at least 60%, at least 65%, at least 70%, at least 75%, at least 80%, at least 85%, at least 90%, at least 95%, at least 90%, or 100%, amino acid sequence identity to the C2c3 amino acid sequence set forth in any of SEQ ID NOs: 831-834. In some cases, a C2c3 protein comprises an amino acid sequence having at least 30%, at least 35%, at least 40%, at least 45%, at least 50%, at least 55%, at least 60%, at least 65%, at least 70%, at least 75%, at least 80%, at least 85%, at least 90%, at least 95%, at least 90%, or 100%, amino acid sequence identity to a contiguous stretch of from 100 amino acids to 200 amino acids (aa), from 200 aa to 400 aa, from 400 aa to 600 aa, from 600 aa to 800 aa, from 800 aa to 1000 aa, from 1000 aa to 1100 aa, from 1100 aa to 1200 aa, or from 1200 aa to 1300 aa, of the C2c3 amino acid sequence set forth in any of SEQ ID NOs: 831-834.

[0117] In some cases, a C2c3 protein comprises an amino acid sequence having at least 30%, at least 35%, at least 40%, at least 45%, at least 50%, at least 55%, at least 60%, at least 65%, at least 70%, at least 75%, at least 80%, at least 85%, at least 90%, at least 95%, at least 90%, or 100%, amino acid sequence identity to the RuvCI domain of the C2c3 amino acid sequence set forth in any of SEQ ID NOs: 831-834. In some cases, a C2c3 protein comprises an amino acid sequence having at least 30%, at least 35%, at least 40%, at least 45%, at least 50%, at least 55%, at least 60%, at least 65%, at least 70%, at least 75%, at least 80%, at least 85%, at least 90%, at least 95%, at least 90%, or 100%, amino acid sequence identity to the RuvCII domain of the C2c3 amino acid sequence set forth in any of SEQ ID NOs: 831-834. In some cases, a C2c3 protein comprises an amino acid sequence having at least 30%, at least 35%, at least 40%, at least 45%, at least 50%, at least 55%, at least 60%, at least 65%, at least 70%, at least 75%, at least 80%, at least 85%, at least 90%, at least 95%, at least 90%, or 100%, amino acid sequence identity to the RuvCIII domain of the C2c3 amino acid sequence set forth in any of SEQ ID NOs: 831-834. In some cases, a C2c3 protein comprises an amino acid sequence having at least 30%, at least 35%, at least 40%, at least 45%, at least 50%, at least 55%, at least 60%, at least 65%, at least 70%, at least 75%, at least 80%, at least 85%, at least 90%, at least 95%, at least 90%, or 100%, amino acid sequence identity to the RuvCI, RuvCII, and RuvCIII domains of the C2c3 amino acid sequence set forth in any of SEQ ID NOs: 831-834.

[0118] In some cases, the C2c3 protein exhibits reduced enzymatic activity relative to a wild-type C2c3 protein (e.g., relative to a C2c3 protein comprising the amino acid sequence set forth in any of SEQ ID NOs: 831-834), and retains DNA binding activity. In some cases, a suitable C2c3 protein comprises an amino acid sequence having at least 30%, at least 35%, at least 40%, at least 45%, at least 50%, at least 55%, at least 60%, at least 65%, at least 70%, at least 75%, at least 80%, at least 85%, at least 90%, at least 95%, at least 90%, or 100%, amino acid sequence identity to the C2c3 amino acid sequence set forth in any of SEQ ID NOs: 831-834.

[0119] In some cases a type VI CRISPR/Cas endonuclease is a C2c2 protein (examples include those set forth as SEQ ID NOs: 835-846). In some cases, a C2c2 protein comprises an amino acid sequence having at least 30%, at least 35%, at least 40%, at least 45%, at least 50%, at least 55%, at least 60%, at least 65%, at least 70%, at least 75%, at least 80%, at least 85%, at least 90%, at least 95%, at least 90%, or 100%, amino acid sequence identity to the C2c2 amino acid sequence set forth in any of SEQ ID NOs: 835-846. In some cases, a C2c2 protein comprises an amino acid sequence having at least 30%, at least 35%, at least 40%, at least 45%, at least 50%, at least 55%, at least 60%, at least 65%, at least 70%, at least 75%, at least 80%, at least 85%, at least 90%, at least 95%, at least 90%, or 100%, amino acid sequence identity to a contiguous stretch of from 100 amino acids to 200 amino acids (aa), from 200 aa to 400 aa, from 400 aa to 600 aa, from 600 aa to 800 aa, from 800 aa to 1000 aa, from 1000 aa to 1100 aa, from 1100 aa to 1200 aa, or from 1200 aa to 1300 aa, of the C2c2 amino acid sequence set forth in any of SEQ ID NOs: 835-846.

[0120] In some cases, a C2c2 protein comprises an amino acid sequence having at least 30%, at least 35%, at least 40%, at least 45%, at least 50%, at least 55%, at least 60%, at least 65%, at least 70%, at least 75%, at least 80%, at least 85%, at least 90%, at least 95%, at least 90%, or 100%, amino acid sequence identity to the RuvCI domain of the C2c2 amino acid sequence set forth in any of SEQ ID NOs: 835-846. In some cases, a C2c2 protein comprises an amino acid sequence having at least 30%, at least 35%, at least 40%, at least 45%, at least 50%, at least 55%, at least 60%, at least 65%, at least 70%, at least 75%, at least 80%, at least 85%, at least 90%, at least 95%, at least 90%, or 100%, amino acid sequence identity to the RuvCII domain of the C2c2 amino acid sequence set forth in any of SEQ ID NOs: 835-846. In some cases, a C2c2 protein comprises an amino acid sequence having at least 30%, at least 35%, at least 40%, at least 45%, at least 50%, at least 55%, at least 60%, at least 65%, at least 70%, at least 75%, at least 80%, at least 85%, at least 90%, at least 95%, at least 90%, or 100%, amino acid sequence identity to the RuvCIII domain of the C2c2 amino acid sequence set forth in any of SEQ ID NOs: 835-846. In some cases, a C2c2 protein comprises an amino acid sequence having at least 30%, at least 35%, at least 40%, at least 45%, at least 50%, at least 55%, at least 60%, at least 65%, at least 70%, at least 75%, at least 80%, at least 85%, at least 90%, at least 95%, at least 90%, or 100%, amino acid sequence identity to the RuvCI, RuvCII, and RuvCIII domains of the C2c2 amino acid sequence set forth in any of SEQ ID NOs: 835-846.

[0121] In some cases, the C2c2 protein exhibits reduced enzymatic activity relative to a wild-type C2c2 protein (e.g., relative to a C2c2 protein comprising the amino acid sequence set forth in any of SEQ ID NOs: 835-846), and retains DNA binding activity. In some cases, a suitable C2c2 protein comprises an amino acid sequence having at least 30%, at least 35%, at least 40%, at least 45%, at least 50%, at least 55%, at least 60%, at least 65%, at least 70%, at least 75%, at least 80%, at least 85%, at least 90%, at least 95%, at least 90%, or 100%, amino acid sequence identity to the C2c2 amino acid sequence set forth in any of SEQ ID NOs: 835-846.

[0122] Examples and guidance related to type V or type VI CRISPR/Cas endonucleases (including domain structure) and guide RNAs (as well as information regarding requirements related to protospacer adjacent motif (PAM) sequences present in targeted nucleic acids) can be found in the art, for example, see Zetsche et al., Cell. 2015 Oct. 22; 163(3):759-71; Makarova et al., Nat Rev Microbiol. 2015 November; 13(11):722-36; Shmakov et al., Mol Cell. 2015 Nov. 5; 60(3):385-97; and Shmakov et al, Nat Rev Microbiol. 2017 March; 15(3):169-182; and U.S. patents and patent applications: U.S. Pat. No. 9,580,701; 20170073695, 20170058272, 20160362668, 20160362667, 20160298078, 20160289637, 20160215300, 20160208243, and 20160208241, each of which is hereby incorporated by reference in its entirety.

### CasX and CasY Proteins

[0123] Suitable RNA-guided endonucleases include CasX and CasY proteins. See, e.g., Burstein et al. (2017) Nature 542:237.

### Cas9 Guide RNA

[0124] A nucleic acid molecule that binds to a Cas9 protein and targets the complex to a specific location within a target nucleic acid is referred to herein as a “Cas9 guide RNA.”

[0125] A Cas9 guide RNA (can be said to include two segments, a first segment (referred to herein as a “targeting segment”); and a second segment (referred to herein as a “protein-binding segment”). By “segment” it is meant a segment/section/region of a molecule, e.g., a contiguous stretch of nucleotides in a nucleic acid molecule. A segment can also mean a region/section of a complex such that a segment may comprise regions of more than one molecule.

[0126] The first segment (targeting segment) of a Cas9 guide RNA includes a nucleotide sequence (a guide sequence) that is complementary to (and therefore hybridizes with) a specific sequence (a target site) within a target nucleic acid (e.g., a target ssRNA, a target ssDNA, the complementary strand of a double stranded target DNA, etc.). The protein-binding segment (or “protein-binding sequence”) interacts with (binds to) a Cas9 polypeptide. The protein-binding segment of a subject Cas9 guide RNA includes two complementary stretches of nucleotides that hybridize to one another to form a double stranded RNA duplex (dsRNA duplex). Site-specific binding and/or cleavage of a target nucleic acid (e.g., genomic DNA) can occur at locations (e.g., target sequence of a target locus) determined by base-pairing complementarity between the Cas9 guide RNA (the guide sequence of the Cas9 guide RNA) and the target nucleic acid.

[0127] A Cas9 guide RNA and a Cas9 protein form a complex (e.g., bind via non-covalent interactions). The Cas9 guide RNA provides target specificity to the complex by including a targeting segment, which includes a guide sequence (a nucleotide sequence that is complementary to a sequence of a target nucleic acid). The Cas9 protein of the complex provides the site-specific activity (e.g., cleavage activity or an activity provided by the Cas9 protein when the Cas9 protein is a Cas9 fusion polypeptide, i.e., has a fusion partner). In other words, the Cas9 protein is guided to a target nucleic acid sequence (e.g. a target sequence in a chromosomal nucleic acid, e.g., a chromosome; a target sequence in an extrachromosomal nucleic acid, e.g. an episomal nucleic acid, a minicircle, an ssRNA, an ssDNA, etc.; a target sequence in a mitochondrial nucleic acid; a target sequence in a chloroplast nucleic acid; a target sequence in a plasmid; a target sequence in a viral nucleic acid; etc.) by virtue of its association with the Cas9 guide RNA.

[0128] The “guide sequence” also referred to as the “targeting sequence” of a Cas9 guide RNA can be modified so that the Cas9 guide RNA can target a Cas9 protein to any desired sequence of any desired target nucleic acid, with the exception that the protospacer adjacent motif (PAM) sequence can be taken into account. Thus, for example, a Cas9 guide RNA can have a targeting segment with a sequence (a guide sequence) that has complementarity with (e.g., can hybridize to) a sequence in a nucleic acid in a eukaryotic cell, e.g., a viral nucleic acid, a eukaryotic nucleic acid (e.g., a eukaryotic chromosome, chromosomal sequence, a eukaryotic RNA, etc.), and the like.

[0129] In some embodiments, a Cas9 guide RNA includes two separate nucleic acid molecules: an “activator” and a “targeter” and is referred to herein as a “dual Cas9 guide RNA”, a “double-molecule Cas9 guide RNA”, or a “two-molecule Cas9 guide RNA” a “dual guide RNA”, or a “dgRNA.” In some embodiments, the activator and targeter are covalently linked to one another (e.g., via intervening nucleotides) and the guide RNA is referred to as a “single guide RNA”, a “Cas9 single guide RNA”, a “single-molecule Cas9 guide RNA,” or a “one-molecule Cas9 guide RNA”, or simply “sgRNA.”

[0130] A Cas9 guide RNA comprises a crRNA-like (“CRISPR RNA”/“targeter”/“crRNA”/“crRNA repeat”) molecule and a corresponding tracrRNA-like (“trans-acting CRISPR RNA”/“activator”/“tracrRNA”) molecule. A crRNA-like molecule (targeter) comprises both the targeting segment (single stranded) of the Cas9 guide RNA and a stretch (“duplex-forming segment”) of nucleotides that forms one half of the dsRNA duplex of the protein-binding segment of the Cas9 guide RNA. A corresponding tracrRNA-like molecule (activator/tracrRNA) comprises a stretch of nucleotides (duplex-forming segment) that forms the other half of the dsRNA duplex of the protein-binding segment of the guide nucleic acid. In other words, a stretch of nucleotides of a crRNA-like molecule are complementary to and hybridize with a stretch of nucleotides of a tracrRNA-like molecule to form the dsRNA duplex of the protein-binding domain of the Cas9 guide RNA. As such, each targeter molecule can be said to have a corresponding activator molecule (which has a region that hybridizes with the targeter). The targeter molecule additionally provides the targeting segment. Thus, a targeter and an activator molecule (as a corresponding pair) hybridize to form a Cas9 guide RNA. The exact sequence of a given crRNA or tracrRNA molecule is characteristic of the species in which the RNA molecules are found. A subject dual Cas9 guide RNA can include any corresponding activator and targeter pair.

[0131] The term “activator” or “activator RNA” is used herein to mean a tracrRNA-like molecule (tracrRNA: “trans-acting CRISPR RNA”) of a Cas9 dual guide RNA (and therefore of a Cas9 single guide RNA when the “activator” and the “targeter” are linked together by, e.g., intervening nucleotides). Thus, for example, a Cas9 guide RNA (dgRNA or sgRNA) comprises an activator sequence (e.g., a tracrRNA sequence). A tracr molecule (a tracrRNA) is a naturally existing molecule that hybridizes with a CRISPR RNA molecule (a crRNA) to form a Cas9 dual guide RNA. The term “activator” is used herein to encompass naturally existing tracrRNAs, but also to encompass tracrRNAs with modifications (e.g., truncations, sequence variations, base modifications, backbone modifications, linkage modifications, etc.) where the activator retains at least one function of a tracrRNA (e.g., contributes to the dsRNA duplex to which Cas9 protein binds). In some cases the activator provides one or more stem loops that can interact with Cas9 protein. An activator can be referred to as having a tracr sequence (tracrRNA sequence) and in some cases is a tracrRNA, but the term “activator” is not limited to naturally existing tracrRNAs.

[0132] The term “targeter” or “targeter RNA” is used herein to refer to a crRNA-like molecule (crRNA: “CRISPR RNA”) of a Cas9 dual guide RNA (and therefore of a Cas9 single guide RNA when the “activator” and the “targeter” are linked together, e.g., by intervening nucleotides). Thus, for example, a Cas9 guide RNA (dgRNA or sgRNA) comprises a targeting segment (which includes nucleotides that hybridize with (are complementary to) a target nucleic acid, and a duplex-forming segment (e.g., a duplex forming segment of a crRNA, which can also be referred to as a crRNA repeat). Because the sequence of a targeting segment (the segment that hybridizes with a target sequence of a target nucleic acid) of a targeter is modified by a user to hybridize with a desired target nucleic acid, the sequence of a targeter will often be a non-naturally occurring sequence. However, the duplex-forming segment of a targeter (described in more detail below), which hybridizes with the duplex-forming segment of an activator, can include a naturally existing sequence (e.g., can include the sequence of a duplex-forming segment of a naturally existing crRNA, which can also be referred to as a crRNA repeat). Thus, the term targeter is used herein to distinguish from naturally occurring crRNAs, despite the fact that part of a targeter (e.g., the duplex-forming segment) often includes a naturally occurring sequence from a crRNA. However, the term “targeter” encompasses naturally occurring crRNAs.

[0133] A Cas9 guide RNA can also be said to include 3 parts: (i) a targeting sequence (a nucleotide sequence that hybridizes with a sequence of the target nucleic acid); (ii) an activator sequence (as described above)(in some cases, referred to as a tracr sequence); and (iii) a sequence that hybridizes to at least a portion of the activator sequence to form a double stranded duplex. A targeter has (i) and (iii); while an activator has (ii).

[0134] A Cas9 guide RNA (e.g. a dual guide RNA or a single guide RNA) can be comprised of any corresponding activator and targeter pair. In some cases, the duplex forming segments can be swapped between the activator and the targeter. In other words, in some cases, the targeter includes a sequence of nucleotides from a duplex forming segment of a tracrRNA (which sequence would normally be part of an activator) while the activator includes a sequence of nucleotides from a duplex forming segment of a crRNA (which sequence would normally be part of a targeter).

[0135] As noted above, a targeter comprises both the targeting segment (single stranded) of the Cas9 guide RNA and a stretch (“duplex-forming segment”) of nucleotides that forms one half of the dsRNA duplex of the protein-binding segment of the Cas9 guide RNA. A corresponding tracrRNA-like molecule (activator) comprises a stretch of nucleotides (a duplex-forming segment) that forms the other half of the dsRNA duplex of the protein-binding segment of the Cas9 guide RNA. In other words, a stretch of nucleotides of the targeter is complementary to and hybridizes with a stretch of nucleotides of the activator to form the dsRNA duplex of the protein-binding segment of a Cas9 guide RNA. As such, each targeter can be said to have a corresponding activator (which has a region that hybridizes with the targeter). The targeter molecule additionally provides the targeting segment. Thus, a targeter and an activator (as a corresponding pair) hybridize to form a Cas9 guide RNA. The particular sequence of a given naturally existing crRNA or tracrRNA molecule is characteristic of the species in which the RNA molecules are found. Examples of suitable activator and targeter are well known in the art.

[0136] A Cas9 guide RNA (e.g. a dual guide RNA or a single guide RNA) can be comprised of any corresponding activator and targeter pair. Non-limiting examples of nucleotide sequences that can be included in a Cas9 guide RNA (dgRNA or sgRNA) include sequences set forth in SEQ ID NOs: 847-1095, or complements thereof. For example, in some cases, sequences from SEQ ID NOs: 847-977 (which are from tracrRNAs) or complements thereof, can pair with sequences from SEQ ID NOs: 867-1095 (which are from crRNAs), or complements thereof, to form a dsRNA duplex of a protein binding segment.

### Targeting Segment of a Cas9 Guide RNA

[0137] The first segment of a subject guide nucleic acid includes a guide sequence (i.e., a targeting sequence)(a nucleotide sequence that is complementary to a sequence (a target site) in a target nucleic acid). In other words, the targeting segment of a subject guide nucleic acid can interact with a target nucleic acid (e.g., double stranded DNA (dsDNA)) in a sequence-specific manner via hybridization (i.e., base pairing). As such, the nucleotide sequence of the targeting segment may vary (depending on the target) and can determine the location within the target nucleic acid that the Cas9 guide RNA and the target nucleic acid will interact. The targeting segment of a Cas9 guide RNA can be modified (e.g., by genetic engineering)/designed to hybridize to any desired sequence (target site) within a target nucleic acid (e.g., a eukaryotic target nucleic acid such as genomic DNA).

[0138] The targeting segment can have a length of 7 or more nucleotides (nt) (e.g., 8 or more, 9 or more, 10 or more, 12 or more, 15 or more, 20 or more, 25 or more, 30 or more, or 40 or more nucleotides). In some cases, the targeting segment can have a length of from 7 to 100 nucleotides (nt) (e.g., from 7 to 80 nt, from 7 to 60 nt, from 7 to 40 nt, from 7 to 30 nt, from 7 to 25 nt, from 7 to 22 nt, from 7 to 20 nt, from 7 to 18 nt, from 8 to 80 nt, from 8 to 60 nt, from 8 to 40 nt, from 8 to 30 nt, from 8 to 25 nt, from 8 to 22 nt, from 8 to 20 nt, from 8 to 18 nt, from 10 to 100 nt, from 10 to 80 nt, from 10 to 60 nt, from 10 to 40 nt, from 10 to 30 nt, from 10 to 25 nt, from 10 to 22 nt, from 10 to 20 nt, from 10 to 18 nt, from 12 to 100 nt, from 12 to 80 nt, from 12 to 60 nt, from 12 to 40 nt, from 12 to 30 nt, from 12 to 25 nt, from 12 to 22 nt, from 12 to 20 nt, from 12 to 18 nt, from 14 to 100 nt, from 14 to 80 nt, from 14 to 60 nt, from 14 to 40 nt, from 14 to 30 nt, from 14 to 25 nt, from 14 to 22 nt, from 14 to 20 nt, from 14 to 18 nt, from 16 to 100 nt, from 16 to 80 nt, from 16 to 60 nt, from 16 to 40 nt, from 16 to 30 nt, from 16 to 25 nt, from 16 to 22 nt, from 16 to 20 nt, from 16 to 18 nt, from 18 to 100 nt, from 18 to 80 nt, from 18 to 60 nt, from 18 to 40 nt, from 18 to 30 nt, from 18 to 25 nt, from 18 to 22 nt, or from 18 to 20 nt).

[0139] The nucleotide sequence (the targeting sequence) of the targeting segment that is complementary to a nucleotide sequence (target site) of the target nucleic acid can have a length of 10 nt or more. For example, the targeting sequence of the targeting segment that is complementary to a target site of the target nucleic acid can have a length of 12 nt or more, 15 nt or more, 18 nt or more, 19 nt or more, or 20 nt or more. In some cases, the nucleotide sequence (the targeting sequence) of the targeting segment that is complementary to a nucleotide sequence (target site) of the target nucleic acid has a length of 12 nt or more. In some cases, the nucleotide sequence (the targeting sequence) of the targeting segment that is complementary to a nucleotide sequence (target site) of the target nucleic acid has a length of 18 nt or more.

[0140] For example, the targeting sequence of the targeting segment that is complementary to a target sequence of the target nucleic acid can have a length of from 10 to 100 nucleotides (nt) (e.g., from 10 to 90 nt, from 10 to 75 nt, from 10 to 60 nt, from 10 to 50 nt, from 10 to 35 nt, from 10 to 30 nt, from 10 to 25 nt, from 10 to 22 nt, from 10 to 20 nt, from 12 to 100 nt, from 12 to 90 nt, from 12 to 75 nt, from 12 to 60 nt, from 12 to 50 nt, from 12 to 35 nt, from 12 to 30 nt, from 12 to 25 nt, from 12 to 22 nt, from 12 to 20 nt, from 15 to 100 nt, from 15 to 90 nt, from 15 to 75 nt, from 15 to 60 nt, from 15 to 50 nt, from 15 to 35 nt, from 15 to 30 nt, from 15 to 25 nt, from 15 to 22 nt, from 15 to 20 nt, from 17 to 100 nt, from 17 to 90 nt, from 17 to 75 nt, from 17 to 60 nt, from 17 to 50 nt, from 17 to 35 nt, from 17 to 30 nt, from 17 to 25 nt, from 17 to 22 nt, from 17 to 20 nt, from 18 to 100 nt, from 18 to 90 nt, from 18 to 75 nt, from 18 to 60 nt, from 18 to 50 nt, from 18 to 35 nt, from 18 to 30 nt, from 18 to 25 nt, from 18 to 22 nt, or from 18 to 20 nt). In some cases, the targeting sequence of the targeting segment that is complementary to a target sequence of the target nucleic acid has a length of from 15 nt to 30 nt. In some cases, the targeting sequence of the targeting segment that is complementary to a target sequence of the target nucleic acid has a length of from 15 nt to 25 nt. In some cases, the targeting sequence of the targeting segment that is complementary to a target sequence of the target nucleic acid has a length of from 18 nt to 30 nt. In some cases, the targeting sequence of the targeting segment that is complementary to a target sequence of the target nucleic acid has a length of from 18 nt to 25 nt. In some cases, the targeting sequence of the targeting segment that is complementary to a target sequence of the target nucleic acid has a length of from 18 nt to 22 nt. In some cases, the targeting sequence of the targeting segment that is complementary to a target site of the target nucleic acid is 20 nucleotides in length. In some cases, the targeting sequence of the targeting segment that is complementary to a target site of the target nucleic acid is 19 nucleotides in length.

[0141] The percent complementarity between the targeting sequence (guide sequence) of the targeting segment and the target site of the target nucleic acid can be 60% or more (e.g., 65% or more, 70% or more, 75% or more, 80% or more, 85% or more, 90% or more, 95% or more, 97% or more, 98% or more, 99% or more, or 100%). In some cases, the percent complementarity between the targeting sequence of the targeting segment and the target site of the target nucleic acid is 100% over the seven contiguous 5′-most nucleotides of the target site of the target nucleic acid. In some cases, the percent complementarity between the targeting sequence of the targeting segment and the target site of the target nucleic acid is 60% or more over about 20 contiguous nucleotides. In some cases, the percent complementarity between the targeting sequence of the targeting segment and the target site of the target nucleic acid is 100% over the fourteen contiguous 5′-most nucleotides of the target site of the target nucleic acid and as low as 0% or more over the remainder. In such a case, the targeting sequence can be considered to be 14 nucleotides in length. In some cases, the percent complementarity between the targeting sequence of the targeting segment and the target site of the target nucleic acid is 100% over the seven contiguous 5′-most nucleotides of the target site of the target nucleic acid and as low as 0% or more over the remainder. In such a case, the targeting sequence can be considered to be 20 nucleotides in length.

[0142] In some cases, the percent complementarity between the targeting sequence of the targeting segment and the target site of the target nucleic acid is 100% over the 7 contiguous 5′-most nucleotides of the target site of the target nucleic acid (which can be complementary to the 3′-most nucleotides of the targeting sequence of the Cas9 guide RNA). In some cases, the percent complementarity between the targeting sequence of the targeting segment and the target site of the target nucleic acid is 100% over the 8 contiguous 5′-most nucleotides of the target site of the target nucleic acid (which can be complementary to the 3′-most nucleotides of the targeting sequence of the Cas9 guide RNA). In some cases, the percent complementarity between the targeting sequence of the targeting segment and the target site of the target nucleic acid is 100% over the 9 contiguous 5′-most nucleotides of the target site of the target nucleic acid (which can be complementary to the 3′-most nucleotides of the targeting sequence of the Cas9 guide RNA). In some cases, the percent complementarity between the targeting sequence of the targeting segment and the target site of the target nucleic acid is 100% over the 10 contiguous 5′-most nucleotides of the target site of the target nucleic acid (which can be complementary to the 3′-most nucleotides of the targeting sequence of the Cas9 guide RNA). In some cases, the percent complementarity between the targeting sequence of the targeting segment and the target site of the target nucleic acid is 100% over the 17 contiguous 5′-most nucleotides of the target site of the target nucleic acid (which can be complementary to the 3′-most nucleotides of the targeting sequence of the Cas9 guide RNA). In some cases, the percent complementarity between the targeting sequence of the targeting segment and the target site of the target nucleic acid is 100% over the 18 contiguous 5′-most nucleotides of the target site of the target nucleic acid (which can be complementary to the 3′-most nucleotides of the targeting sequence of the Cas9 guide RNA). In some cases, the percent complementarity between the targeting sequence of the targeting segment and the target site of the target nucleic acid is 60% or more (e.g., e.g., 65% or more, 70% or more, 75% or more, 80% or more, 85% or more, 90% or more, 95% or more, 97% or more, 98% or more, 99% or more, or 100%) over about 20 contiguous nucleotides.

[0143] In some cases, the percent complementarity between the targeting sequence of the targeting segment and the target site of the target nucleic acid is 100% over the 7 contiguous 5′-most nucleotides of the target site of the target nucleic acid and as low as 0% or more over the remainder. In such a case, the targeting sequence can be considered to be 7 nucleotides in length. In some cases, the percent complementarity between the targeting sequence of the targeting segment and the target site of the target nucleic acid is 100% over the 8 contiguous 5′-most nucleotides of the target site of the target nucleic acid and as low as 0% or more over the remainder. In such a case, the targeting sequence can be considered to be 8 nucleotides in length. In some cases, the percent complementarity between the targeting sequence of the targeting segment and the target site of the target nucleic acid is 100% over the 9 contiguous 5′-most nucleotides of the target site of the target nucleic acid and as low as 0% or more over the remainder. In such a case, the targeting sequence can be considered to be 9 nucleotides in length. In some cases, the percent complementarity between the targeting sequence of the targeting segment and the target site of the target nucleic acid is 100% over the 10 contiguous 5′-most nucleotides of the target site of the target nucleic acid and as low as 0% or more over the remainder. In such a case, the targeting sequence can be considered to be 10 nucleotides in length. In some cases, the percent complementarity between the targeting sequence of the targeting segment and the target site of the target nucleic acid is 100% over the 11 contiguous 5′-most nucleotides of the target site of the target nucleic acid and as low as 0% or more over the remainder. In such a case, the targeting sequence can be considered to be 11 nucleotides in length. In some cases, the percent complementarity between the targeting sequence of the targeting segment and the target site of the target nucleic acid is 100% over the 12 contiguous 5′-most nucleotides of the target site of the target nucleic acid and as low as 0% or more over the remainder. In such a case, the targeting sequence can be considered to be 12 nucleotides in length. In some cases, the percent complementarity between the targeting sequence of the targeting segment and the target site of the target nucleic acid is 100% over the 13 contiguous 5′-most nucleotides of the target site of the target nucleic acid and as low as 0% or more over the remainder. In such a case, the targeting sequence can be considered to be 13 nucleotides in length. In some cases, the percent complementarity between the targeting sequence of the targeting segment and the target site of the target nucleic acid is 100% over the 14 contiguous 5′-most nucleotides of the target site of the target nucleic acid and as low as 0% or more over the remainder. In such a case, the targeting sequence can be considered to be 14 nucleotides in length. In some cases, the percent complementarity between the targeting sequence of the targeting segment and the target site of the target nucleic acid is 100% over the 17 contiguous 5′-most nucleotides of the target site of the target nucleic acid and as low as 0% or more over the remainder. In such a case, the targeting sequence can be considered to be 17 nucleotides in length. In some cases, the percent complementarity between the targeting sequence of the targeting segment and the target site of the target nucleic acid is 100% over the 18 contiguous 5′-most nucleotides of the target site of the target nucleic acid and as low as 0% or more over the remainder. In such a case, the targeting sequence can be considered to be 18 nucleotides in length.

[0144] Examples of various Cas9 proteins and Cas9 guide RNAs (as well as information regarding requirements related to protospacer adjacent motif (PAM) sequences present in targeted nucleic acids) can be found in the art, for example, see Jinek et al., Science. 2012 Aug. 17; 337(6096):816-21; Chylinski et al., RNA Biol. 2013 May; 10(5):726-37; Ma et al., Biomed Res Int. 2013; 2013:270805; Hou et al., Proc Natl Acad Sci USA. 2013 Sep. 24; 110(39):15644-9; Jinek et al., Elife. 2013; 2:e00471; Pattanayak et al., Nat Biotechnol. 2013 September; 31(9):839-43; Qi et al., Cell. 2013 Feb. 28; 152(5):1173-83; Wang et al., Cell. 2013 May 9; 153(4):910-8; Auer et al., Genome Res. 2013 Oct. 31; Chen et al., Nucleic Acids Res. 2013 Nov. 1; 41(20):e19; Cheng et al., Cell Res. 2013 October; 23(10):1163-71; Cho et al., Genetics. 2013 November; 195(3):1177-80; DiCarlo et al., Nucleic Acids Res. 2013 April; 41(7):4336-43; Dickinson et al., Nat Methods. 2013 October; 10(10):1028-34; Ebina et al., Sci Rep. 2013; 3:2510; Fujii et al., Nucleic Acids Res. 2013 Nov. 1; 41(20):e187; Hu et al., Cell Res. 2013 November; 23(11):1322-5; Jiang et al., Nucleic Acids Res. 2013 Nov. 1; 41(20):e188; Larson et al., Nat Protoc. 2013 November; 8(11):2180-96; Mali et al., Nat Methods. 2013 October; 10(10):957-63; Nakayama et al., Genesis. 2013 December; 51(12):835-43; Ran et al., Nat Protoc. 2013 November; 8(11):2281-308; Ran et al., Cell. 2013 Sep. 12; 154(6):1380-9; Upadhyay et al., G3 (Bethesda). 2013 Dec. 9; 3(12):2233-8; Walsh et al., Proc Natl Acad Sci USA. 2013 Sep. 24; 110(39):15514-5; Xie et al., Mol Plant. 2013 Oct. 9; Yang et al., Cell. 2013 Sep. 12; 154(6):1370-9; Briner et al., Mol Cell. 2014 Oct. 23; 56(2):333-9; and U.S. patents and patent applications: U.S. Pat. Nos. 8,906,616; 8,895,308; 8,889,418; 8,889,356; 8,871,445; 8,865,406; 8,795,965; 8,771,945; 8,697,359; 20140068797; 20140170753; 20140179006; 20140179770; 20140186843; 20140186919; 20140186958; 20140189896; 20140227787; 20140234972; 20140242664; 20140242699; 20140242700; 20140242702; 20140248702; 20140256046; 20140273037; 20140273226; 20140273230; 20140273231; 20140273232; 20140273233; 20140273234; 20140273235; 20140287938; 20140295556; 20140295557; 20140298547; 20140304853; 20140309487; 20140310828; 20140310830; 20140315985; 20140335063; 20140335620; 20140342456; 20140342457; 20140342458; 20140349400; 20140349405; 20140356867; 20140356956; 20140356958; 20140356959; 20140357523; 20140357530; 20140364333; and 20140377868; all of which are hereby incorporated by reference in their entirety.

### Guide RNAs Corresponding to Type V and Type VI CRISPR/Cas Endonucleases (e.g., Cpf1 Guide RNA)

[0145] A guide RNA that binds to a type V or type VI CRISPR/Cas protein (e.g., Cpf1, C2c1, C2c2, C2c3), and targets the complex to a specific location within a target nucleic acid is referred to herein generally as a “type V or type VI CRISPR/Cas guide RNA”. An example of a more specific term is a “Cpf1 guide RNA.”

[0146] A type V or type VI CRISPR/Cas guide RNA (e.g., cpf1 guide RNA) can have a total length of from 30 nucleotides (nt) to 200 nt, e.g., from 30 nt to 180 nt, from 30 nt to 160 nt, from 30 nt to 150 nt, from 30 nt to 125 nt, from 30 nt to 100 nt, from 30 nt to 90 nt, from 30 nt to 80 nt, from 30 nt to 70 nt, from 30 nt to 60 nt, from 30 nt to 50 nt, from 50 nt to 200 nt, from 50 nt to 180 nt, from 50 nt to 160 nt, from 50 nt to 150 nt, from 50 nt to 125 nt, from 50 nt to 100 nt, from 50 nt to 90 nt, from 50 nt to 80 nt, from 50 nt to 70 nt, from 50 nt to 60 nt, from 70 nt to 200 nt, from 70 nt to 180 nt, from 70 nt to 160 nt, from 70 nt to 150 nt, from 70 nt to 125 nt, from 70 nt to 100 nt, from 70 nt to 90 nt, or from 70 nt to 80 nt). In some cases, a type V or type VI CRISPR/Cas guide RNA (e.g., cpf1 guide RNA) has a total length of at least 30 nt (e.g., at least 40 nt, at least 50 nt, at least 60 nt, at least 70 nt, at least 80 nt, at least 90 nt, at least 100 nt, or at least 120 nt,).

[0147] In some cases, a Cpf1 guide RNA has a total length of 35 nt, 36 nt, 37 nt, 38 nt, 39 nt, 40 nt, 41 nt, 42 nt, 43 nt, 44 nt, 45 nt, 46 nt, 47 nt, 48 nt, 49 nt, or 50 nt.

[0148] Like a Cas9 guide RNA, a type V or type VI CRISPR/Cas guide RNA (e.g., cpf1 guide RNA) can include a target nucleic acid-binding segment and a duplex-forming region (e.g., in some cases formed from two duplex-forming segments, i.e., two stretches of nucleotides that hybridize to one another to form a duplex).

[0149] The target nucleic acid-binding segment of a type V or type VI CRISPR/Cas guide RNA (e.g., cpf1 guide RNA) can have a length of from 15 nt to 30 nt, e.g., 15 nt, 16 nt, 17 nt, 18 nt, 19 nt, 20 nt, 21 nt, 22 nt, 23 nt, 24 nt, 25 nt, 26 nt, 27 nt, 28 nt, 29 nt, or 30 nt. In some cases, the target nucleic acid-binding segment has a length of 23 nt. In some cases, the target nucleic acid-binding segment has a length of 24 nt. In some cases, the target nucleic acid-binding segment has a length of 25 nt.

[0150] The guide sequence of a type V or type VI CRISPR/Cas guide RNA (e.g., cpf1 guide RNA) can have a length of from 15 nt to 30 nt (e.g., 15 to 25 nt, 15 to 24 nt, 15 to 23 nt, 15 to 22 nt, 15 to 21 nt, 15 to 20 nt, 15 to 19 nt, 15 to 18 nt, 17 to 30 nt, 17 to 25 nt, 17 to 24 nt, 17 to 23 nt, 17 to 22 nt, 17 to 21 nt, 17 to 20 nt, 17 to 19 nt, 17 to 18 nt, 18 to 30 nt, 18 to 25 nt, 18 to 24 nt, 18 to 23 nt, 18 to 22 nt, 18 to 21 nt, 18 to 20 nt, 18 to 19 nt, 19 to 30 nt, 19 to 25 nt, 19 to 24 nt, 19 to 23 nt, 19 to 22 nt, 19 to 21 nt, 19 to 20 nt, 20 to 30 nt, 20 to 25 nt, 20 to 24 nt, 20 to 23 nt, 20 to 22 nt, 20 to 21 nt, 15 nt, 16 nt, 17 nt, 18 nt, 19 nt, 20 nt, 21 nt, 22 nt, 23 nt, 24 nt, 25 nt, 26 nt, 27 nt, 28 nt, 29 nt, or 30 nt). In some cases, the guide sequence has a length of 17 nt. In some cases, the guide sequence has a length of 18 nt. In some cases, the guide sequence has a length of 19 nt. In some cases, the guide sequence has a length of 20 nt. In some cases, the guide sequence has a length of 21 nt. In some cases, the guide sequence has a length of 22 nt. In some cases, the guide sequence has a length of 23 nt. In some cases, the guide sequence has a length of 24 nt.

[0151] The guide sequence of a type V or type VI CRISPR/Cas guide RNA (e.g., cpf1 guide RNA) can have 100% complementarity with a corresponding length of target nucleic acid sequence. The guide sequence can have less than 100% complementarity with a corresponding length of target nucleic acid sequence. For example, the guide sequence of a type V or type VI CRISPR/Cas guide RNA (e.g., cpf1 guide RNA) can have 1, 2, 3, 4, or 5 nucleotides that are not complementary to the target nucleic acid sequence. For example, in some cases, where a guide sequence has a length of 25 nucleotides, and the target nucleic acid sequence has a length of 25 nucleotides, in some cases, the target nucleic acid-binding segment has 100% complementarity to the target nucleic acid sequence. As another example, in some cases, where a guide sequence has a length of 25 nucleotides, and the target nucleic acid sequence has a length of 25 nucleotides, in some cases, the target nucleic acid-binding segment has 1 non-complementary nucleotide and 24 complementary nucleotides with the target nucleic acid sequence. As another example, in some cases, where a guide sequence has a length of 25 nucleotides, and the target nucleic acid sequence has a length of 25 nucleotides, in some cases, the target nucleic acid-binding segment has 2 non-complementary nucleotides and 23 complementary nucleotides with the target nucleic acid sequence.

[0152] The duplex-forming segment of a type V or type VI CRISPR/Cas guide RNA (e.g., cpf1 guide RNA) (e.g., of a targeter RNA or an activator RNA) can have a length of from 15 nt to 25 nt (e.g., 15 nt, 16 nt, 17 nt, 18 nt, 19 nt, 20 nt, 21 nt, 22 nt, 23 nt, 24 nt, or 25 nt).

[0153] The RNA duplex of a type V or type VI CRISPR/Cas guide RNA (e.g., cpf1 guide RNA) can have a length of from 5 base pairs (bp) to 40 bp (e.g., from 5 to 35 bp, 5 to 30 bp, 5 to 25 bp, 5 to 20 bp, 5 to 15 bp, 5-12 bp, 5-10 bp, 5-8 bp, 6 to 40 bp, 6 to 35 bp, 6 to 30 bp, 6 to 25 bp, 6 to 20 bp, 6 to 15 bp, 6 to 12 bp, 6 to 10 bp, 6 to 8 bp, 7 to 40 bp, 7 to 35 bp, 7 to 30 bp, 7 to 25 bp, 7 to 20 bp, 7 to 15 bp, 7 to 12 bp, 7 to 10 bp, 8 to 40 bp, 8 to 35 bp, 8 to 30 bp, 8 to 25 bp, 8 to 20 bp, 8 to 15 bp, 8 to 12 bp, 8 to 10 bp, 9 to 40 bp, 9 to 35 bp, 9 to 30 bp, 9 to 25 bp, 9 to 20 bp, 9 to 15 bp, 9 to 12 bp, 9 to 10 bp, 10 to 40 bp, 10 to 35 bp, 10 to 30 bp, 10 to 25 bp, 10 to 20 bp, 10 to 15 bp, or 10 to 12 bp).

[0154] As an example, a duplex-forming segment of a Cpf1 guide RNA can comprise a nucleotide sequence selected from (5′ to 3′): AAUUUCUACUGUUGUAGAU (SEQ ID NO: 1096), AAUUUCUGCUGUUGCAGAU (SEQ ID NO: 1097), AAUUUCCACUGUUGUGGAU (SEQ ID NO: 1098), AAUUCCUACUGUUGUAGGU (SEQ ID NO: 1099), AAUUUCUACUAUUGUAGAU (SEQ ID NO: 1100), AAUUUCUACUGCUGUAGAU (SEQ ID NO: 1101), AAUUUCUACUUUGUAGAU (SEQ ID NO: 1102), and AAUUUCUACUUGUAGAU (SEQ ID NO: 1103). The guide sequence can then follow (5′ to 3′) the duplex forming segment.

[0155] A non-limiting example of an activator RNA (e.g. tracrRNA) of a C2c1 guide RNA (dual guide or single guide) is an RNA that includes the nucleotide sequence GAAUUUUUCAACGGGUGUGCCAAUGGCCACUUUCCAGGUGGCAAAGCCCGUUGA GCUUCUCAAAAAG (SEQ ID NO: 1104). In some cases, a C2c1 guide RNA (dual guide or single guide) is an RNA that includes the nucleotide sequence In some cases, a C2c1 guide RNA (dual guide or single guide) is an RNA that includes the nucleotide sequence GUCUAGAGGACAGAAUUUUUCAACGGGUGUGCCAAUGGCCACUUUCCAGGUGGC AAAGCCCGUUGAGCUUCUCAAAAAG (SEQ ID NO: 1105). In some cases, a C2c1 guide RNA (dual guide or single guide) is an RNA that includes the nucleotide sequence UCUAGAGGACAGAAUUUUUCAACGGGUGUGCCAAUGGCCACUUUCCAGGUGGCA AAGCCCGUUGAGCUUCUCAAAAAG (SEQ ID NO: 1106). A non-limiting example of an activator RNA (e.g. tracrRNA) of a C2c1 guide RNA (dual guide or single guide) is an RNA that includes the nucleotide sequence ACUUUCCAGGCAAAGCCCGUUGAGCUUCUCAAAAAG (SEQ ID NO: 1107). In some cases, a duplex forming segment of a C2c1 guide RNA (dual guide or single guide) of an activator RNA (e.g. tracrRNA) includes the nucleotide sequence AGCUUCUCA (SEQ ID NO: 1108) or the nucleotide sequence GCUUCUCA (SEQ ID NO: 1109) (the duplex forming segment from a naturally existing tracrRNA.

[0156] A non-limiting example of a targeter RNA (e.g. crRNA) of a C2c1 guide RNA (dual guide or single guide) is an RNA with the nucleotide sequence CUGAGAAGUGGCACNNNNNNNNNNNNNNNNNNNN (SEQ ID NO: 1110), where the Ns represent the guide sequence, which will vary depending on the target sequence, and although 20 Ns are depicted a range of different lengths are acceptable. In some cases, a duplex forming segment of a C2c1 guide RNA (dual guide or single guide) of a targeter RNA (e.g. crRNA) includes the nucleotide sequence CUGAGAAGUGGCAC (SEQ ID NO: 1111) or includes the nucleotide sequence CUGAGAAGU (SEQ ID NO: 1112) or includes the nucleotide sequence UGAGAAGUGGCAC (SEQ ID NO: 1113) or includes the nucleotide sequence UGAGAAGU (SEQ ID NO: 1114).

[0157] Examples and guidance related to type V or type VI CRISPR/Cas endonucleases and guide RNAs (as well as information regarding requirements related to protospacer adjacent motif (PAM) sequences present in targeted nucleic acids) can be found in the art, for example, see Zetsche et al., Cell. 2015 Oct. 22; 163(3):759-71; Makarova et al., Nat Rev Microbiol. 2015 November; 13(11):722-36; and Shmakov et al., Mol Cell. 2015 Nov. 5; 60(3):385-97.

### Donor DNA Template

[0158] As noted above, in some cases, a composition of the present disclosure comprises a donor DNA polynucleotide. In some cases, a method of the present disclosure for modifying a target nucleic acid comprises contacting a eukaryotic cell comprising a target nucleic acid with a composition of the present disclosure, where the composition comprises a donor DNA polynucleotide. In some cases, the contacting occurs under conditions that are permissive for nonhomologous end joining (NHEJ) or homology-directed repair (HDR). In some cases, the target DNA is contacted with the donor polynucleotide (donor DNA template), wherein the donor polynucleotide, a portion of the donor polynucleotide, a copy of the donor polynucleotide, or a portion of a copy of the donor polynucleotide integrates into the target DNA.

[0159] In some cases, the donor polynucleotide comprises a nucleotide sequence that includes at least a segment with homology to the target DNA sequence, and the subject methods may be used to add, i.e. insert or replace, nucleic acid material to a target DNA sequence (e.g. to “knock in” a nucleic acid that encodes for a protein, an siRNA, an miRNA, etc.), to add a tag (e.g., 6×His, a fluorescent protein (e.g., a green fluorescent protein; a yellow fluorescent protein, etc.), hemagglutinin (HA), FLAG, etc.), to add a regulatory sequence to a gene (e.g., a promoter, a polyadenylation signal, an internal ribosome entry sequence (IRES), a 2A peptide, a start codon, a stop codon, a splice signal, a localization signal, etc.), to modify a nucleic acid sequence (e.g., introduce a mutation), and the like. As such, a complex (RNP) comprising a guide RNA and a fusion site-directed modifying polypeptide (e.g., a fusion class 2 CRISPR/Cas polypeptide) of the present disclosure is useful in any in vitro or in vivo application in which it is desirable to modify DNA in a site-specific, i.e. “targeted”, way, for example gene knock-out, gene knock-in, gene editing, gene tagging, etc., as used in, for example, gene therapy, e.g. to treat a disease or as an antiviral, anti-pathogenic, or anticancer therapeutic, the production of genetically modified organisms in agriculture, the large scale production of proteins by cells for therapeutic, diagnostic, or research purposes, the induction of iPS cells, biological research, the targeting of genes of pathogens for deletion or replacement, etc.

[0160] In applications in which it is desirable to insert a polynucleotide sequence into a target DNA sequence, a polynucleotide comprising a donor sequence to be inserted is also provided to the cell, e.g., a donor polynucleotide is included in an RNP of the present disclosure. By a “donor sequence” or “donor polynucleotide” it is meant a nucleic acid sequence to be inserted at the cleavage site induced by a fusion site-directed modifying polypeptide (e.g., a fusion class 2 CRISPR/Cas polypeptide) of the present disclosure. The donor polynucleotide will contain sufficient homology to a genomic sequence at the cleavage site, e.g. 70%, 80%, 85%, 90%, 95%, or 100% homology with the nucleotide sequences flanking the cleavage site, e.g. within about 50 bases or less of the cleavage site, e.g. within about 30 bases, within about 15 bases, within about 10 bases, within about 5 bases, or immediately flanking the cleavage site, to support homology-directed repair between it and the genomic sequence to which it bears homology. Approximately 25, 50, 100, or 200 nucleotides, or more than 200 nucleotides, of sequence homology between a donor and a genomic sequence (or any integral value between 10 and 200 nucleotides, or more) will support homology-directed repair. Donor sequences can be of any length, e.g. 10 nucleotides or more, 50 nucleotides or more, 100 nucleotides or more, 250 nucleotides or more, 500 nucleotides or more, 1000 nucleotides or more, 5000 nucleotides or more, etc.

[0161] The donor sequence is typically not identical to the genomic sequence that it replaces. Rather, the donor sequence may contain one or more single base changes, insertions, deletions, inversions or rearrangements with respect to the genomic sequence, so long as sufficient homology is present to support homology-directed repair. In some embodiments, the donor sequence comprises a non-homologous sequence flanked by two regions of homology, such that homology-directed repair between the target DNA region and the two flanking sequences results in insertion of the non-homologous sequence at the target region. Donor sequences may also comprise a vector backbone containing sequences that are not homologous to the DNA region of interest and that are not intended for insertion into the DNA region of interest. Generally, the homologous region(s) of a donor sequence will have at least 50% sequence identity to a genomic sequence with which recombination is desired. In certain embodiments, 60%, 70%, 80%, 90%, 95%, 98%, 99%, or 99.9% sequence identity is present. Any value between 1% and 100% sequence identity can be present, depending upon the length of the donor polynucleotide.

[0162] The donor nucleic acid may comprise certain sequence differences as compared to the genomic sequence, e.g. restriction sites, nucleotide polymorphisms, selectable markers (e.g., drug resistance genes, fluorescent proteins, enzymes etc.), etc., which may be used to assess for successful insertion of the donor nucleic acid at the cleavage site or in some cases may be used for other purposes (e.g., to signify expression at the targeted genomic locus). In some cases, if located in a coding region, such nucleotide sequence differences will not change the amino acid sequence, or will make silent amino acid changes (i.e., changes which do not affect the structure or function of the protein). Alternatively, these sequences differences may include flanking recombination sequences such as FLPs, loxP sequences, or the like, that can be activated at a later time for removal of the marker sequence.

[0163] The donor nucleic acid may be provided to the cell as single-stranded DNA, single-stranded RNA, double-stranded DNA, or double-stranded RNA. It may be introduced into a cell in linear or circular form. If introduced in linear form, the ends of the donor sequence may be protected (e.g., from exonucleolytic degradation) by methods known to those of skill in the art. For example, one or more dideoxynucleotide residues are added to the 3′ terminus of a linear molecule and/or self-complementary oligonucleotides are ligated to one or both ends. See, for example, Chang et al. (1987) Proc. Natl. Acad. Sci. USA 84:4959-4963; Nehls et al. (1996) Science 272:886-889. Additional methods for protecting exogenous polynucleotides from degradation include, but are not limited to, addition of terminal amino group(s) and the use of modified internucleotide linkages such as, for example, phosphorothioates, phosphoramidates, and O-methyl ribose or deoxyribose residues. As an alternative to protecting the termini of a linear donor nucleic acid, additional lengths of sequence may be included outside of the regions of homology that can be degraded without adversely affecting recombination. A donor nucleic acid can be introduced into a cell as part of a vector molecule having additional sequences such as, for example, replication origins, promoters and genes encoding antibiotic resistance.

### Methods

[0164] A composition of the present disclosure can be used in any method in which a Cas9 protein or a Cpf1 protein can be used. For example, a composition of the present disclosure, can be used to (i) modify (e.g., cleave, e.g., nick; methylate; etc.) a target nucleic acid (DNA or RNA; single stranded or double stranded); (ii) modulate transcription of a target nucleic acid; (iii) label a target nucleic acid; (iv) bind a target nucleic acid (e.g., for purposes of isolation, labeling, imaging, tracking, etc.); (v) modify a polypeptide (e.g., a histone) associated with a target nucleic acid; and the like. Because a method that uses an RNA-guided endonuclease polypeptide includes binding of the RNA-guided endonuclease polypeptide to a particular region in a target nucleic acid (by virtue of being targeted there by an associated guide RNA (e.g., a Cas9 guide RNA or a Cpf1 guide RNA)), the methods are generally referred to herein as methods of binding (e.g., a method of binding a target nucleic acid). However, it is to be understood that in some cases, while a method of binding may result in nothing more than binding of the target nucleic acid, in other cases, the method can have different final results (e.g., the method can result in modification of the target nucleic acid, e.g., cleavage/methylation/etc., modulation of transcription from the target nucleic acid, modulation of translation of the target nucleic acid, genome editing, modulation of a protein associated with the target nucleic acid, isolation of the target nucleic acid, etc.).

[0165] For example, the present disclosure provides methods of cleaving a target nucleic acid; methods of editing a target nucleic acid; methods of modulating transcription from a target nucleic acid; methods of isolating a target nucleic acid, methods of binding a target nucleic acid, methods of imaging a target nucleic acid, methods of modifying a target nucleic acid, and the like. The methods generally involve contacting a eukaryotic cell comprising a target nucleic acid with a composition of the present disclosure.

[0166] The present disclosure provides a method of binding a target nucleic acid in a eukaryotic cell. The method generally involves: contacting the eukaryotic cell comprising the target nucleic acid with a composition of the present disclosure, where the RNP enters the cell, and where the guide RNA and the RNA-guided endonuclease bind to the target nucleic acid in the cell. In some cases, the contacting occurs in vitro. In some cases, the contacting occurs in vivo. In some cases, the RNA-guided endonuclease modulates transcription from the target nucleic acid. In some cases, the RNA-guided endonuclease modifies the target nucleic acid. In some cases, the RNA-guided endonuclease cleaves the target nucleic acid. In some cases, the complex comprises a donor DNA template.

[0167] The present disclosure provides a method of genetically modifying a eukaryotic target cell, the method comprising contacting the eukaryotic target cell with a composition of the present disclosure In some cases, the target cell is an in vivo target cell. In some cases, the target cell is an animal cell. In some cases, the target cell is a mammalian cell. In some cases, the target cell is neuron. In some cases, the target cell is stem cell. In some cases, the target cell is a cancer cell.

### Target Nucleic Acids and Target Cells of Interest

[0168] A target nucleic acid can be any nucleic acid (e.g., DNA, RNA), can be double stranded or single stranded, can be any of a number of types of nucleic acid (e.g., a chromosome, derived from a chromosome, chromosomal, plasmid, viral, mitochondrial, chloroplast, linear, circular, etc.) and can be from any organism (e.g., as long as the guide RNA (e.g., Cas9 guide RNA, Cpf1 guide RNA) can hybridize to a target sequence in a target nucleic acid, such that target nucleic acid can be targeted). In general, the target nucleic acid is present in a eukaryotic cell.

[0169] A target nucleic acid can be DNA or RNA. A target nucleic acid can be double stranded (e.g., dsDNA, dsRNA) or single stranded (e.g., ssRNA, ssDNA). In some cases, a target nucleic acid is single stranded. In some cases, a target nucleic acid is a single stranded RNA (ssRNA). In some cases, a target ssRNA (e.g., a target cell ssRNA, a viral ssRNA, etc.) is selected from: mRNA, rRNA, tRNA, non-coding RNA (ncRNA), long non-coding RNA (lncRNA), and microRNA (miRNA). In some cases, a target nucleic acid is a single stranded DNA (ssDNA) (e.g., a viral DNA). As noted above, in some cases, a target nucleic acid is single stranded. In some cases, a target nucleic acid is a double-stranded DNA.

[0170] A target nucleic acid can be located within a eukaryotic cell, for example, inside of a eukaryotic cell in vitro, inside of a eukaryotic cell in vivo, inside of a eukaryotic cell ex vivo. Suitable target cells (which can comprise target nucleic acids) include, but are not limited to: a single-celled eukaryotic organism; a cell of a single-cell eukaryotic organism; a plant cell; an algal cell; a fungal cell (e.g., a yeast cell); an animal cell; a cell from or present in an invertebrate animal (e.g., an insect, a fruit fly, a cnidarian, an echinoderm, a nematode, an arachnid, etc.); a cell from or present in a vertebrate animal (e.g., a fish, an amphibian, a reptile, a bird, a mammal); a cell from or present in a mammal (e.g., a cell from or present in a rodent, a cell from or present in a human, a cell from or present in a non-human mammal, a cell from or present in a non-human primate, a cell from or present in an ungulate, etc.); and the like. Any type of cell may be of interest (e.g. a stem cell, e.g. an embryonic stem (ES) cell, an induced pluripotent stem (iPS) cell, a germ cell (e.g., an oocyte, a sperm, an oogonia, a spermatogonia, etc.), a somatic cell, e.g. a fibroblast, an oligodendrocyte, a glial cell, a hematopoietic cell, a neuron, a muscle cell, a bone cell, a hepatocyte, a pancreatic cell; an in vitro or in vivo embryonic cell of an embryo at any stage, e.g., a 1-cell, 2-cell, 4-cell, 8-cell, etc. stage zebrafish embryo; etc.). Cells may be from established cell lines or they may be primary cells, where “primary cells”, “primary cell lines”, and “primary cultures” are used interchangeably herein to refer to cells and cells cultures that have been derived from a subject and allowed to grow in vitro for a limited number of passages, i.e. splittings, of the culture. For example, primary cultures are cultures that may have been passaged 0 times, 1 time, 2 times, 4 times, 5 times, 10 times, or 15 times, but not enough times go through the crisis stage. Typically, the primary cell lines are maintained for fewer than 10 passages in vitro. Target cells can be unicellular organisms and/or can be grown in culture. If the cells are primary cells, they may be harvest from an individual by any convenient method. For example, leukocytes may be conveniently harvested by apheresis, leukocytapheresis, density gradient separation, etc., while cells from tissues such as skin, muscle, bone marrow, spleen, liver, pancreas, lung, intestine, stomach, etc. can be conveniently harvested by biopsy.

[0171] Target cells include in vivo target cells. Target cells include retinal cells (e.g., Müller cells, ganglion cells, amacrine cells, horizontal cells, bipolar cells, and photoreceptor cells including rods and cones, Müller glial cells, and retinal pigmented epithelium); neural cells (e.g., cells of the thalamus, sensory cortex, zona incerta (ZI), ventral tegmental area (VTA), prefontal cortex (PFC), nucleus accumbens (NAc), amygdala (BLA), substantia nigra, ventral pallidum, globus pallidus, dorsal striatum, ventral striatum, subthalamic nucleus, hippocampus, dentate gyrus, cingulate gyrus, entorhinal cortex, olfactory cortex, primary motor cortex, or cerebellum); liver cells; kidney cells; immune cells; cardiac cells; skeletal muscle cells; smooth muscle cells; lung cells; and the like.

[0172] In some of the above applications, the subject methods may be employed to induce target nucleic acid cleavage, target nucleic acid modification, and/or to bind target nucleic acids (e.g., for visualization, for collecting and/or analyzing, etc.) in mitotic or post-mitotic cells in vivo and/or ex vivo and/or in vitro (e.g., to disrupt production of a protein encoded by a targeted mRNA). Because the guide RNA provides specificity by hybridizing to target nucleic acid, a mitotic and/or post-mitotic cell of interest in the disclosed methods may include a cell from any organism (e.g. a single-celled eukaryotic organism, a cell of a single-cell eukaryotic organism, a plant cell, an algal cell, a fungal cell (e.g., a yeast cell), an animal cell, an arachnid cell, an insect cell, a cell from or present in an invertebrate animal (e.g. fruit fly, cnidarian, echinoderm, nematode, etc.), a cell from or present in a vertebrate animal (e.g., fish, amphibian, reptile, bird, mammal), a cell from or present in a mammal, a cell from or present in a rodent (e.g., mouse; rat), a cell from or present in a human, etc.). The target cell can be a normal (e.g., non-diseased) cell. The target cell can be a diseased cell. The target cell can be a cancer cell. The target cell can be a cell comprising a deleterious mutation in a gene.

### Examples of Non-Limiting Aspects of the Disclosure

[0173] Aspects, including embodiments, of the present subject matter described above may be beneficial alone or in combination, with one or more other aspects or embodiments. Without limiting the foregoing description, certain non-limiting aspects of the disclosure numbered 1-44 are provided below. As will be apparent to those of skill in the art upon reading this disclosure, each of the individually numbered aspects may be used or combined with any of the preceding or following individually numbered aspects. This is intended to provide support for all such combinations of aspects and is not limited to combinations of aspects explicitly provided below:

[0174] Aspect 1. A composition comprising: a) an RNA-guided endonuclease; and b) an agent that decreases the acidity of an endosome.

[0175] Aspect 2. The composition of aspect 1, comprising a guide RNA comprising a segment that binds to the RNA-guided endonuclease.

[0176] Aspect 3. The composition of aspect 2, wherein the RNA-guided endonuclease is complexed with the guide RNA to form a ribonucleoprotein (RNP).

[0177] Aspect 4. The composition of any one of aspects 1-3, wherein the agent that decreases the acidity of endosomes is selected from the group consisting of amantadine, amiodarone, ammonium chloride, azithromycin, bafilomycin A1, a benzolactone enamide, bepridil, diphyllin, an indolyl, a macrolactone, monensin, nigericin, a plecomacrolide, a quinoline, and a sulfonamide.

[0178] Aspect 5. The composition of any one of aspects 1-3, wherein the agent that decreases the acidity of endosomes is a benzolactone enamide selected from the group consisting of salicylihalamide, lobatamide, apicularen, oximidine, and cruentaren.

[0179] Aspect 6. The composition of any one of aspects 1-3, wherein the agent that decreases the acidity of endosomes is a macrolactone selected from the group consisting of archazolid and azithromycin.

[0180] Aspect 7. The composition of any one of aspects 1-3, wherein the agent that decreases the acidity of endosomes is a plecomacrolide selected from the group consisting of bafilomycin A1 and concanamycin.

[0181] Aspect 8. The composition of any one of aspects 1-3, wherein the agent that decreases the acidity of endosomes is a quinoline selected from the group consisting of amodiaquine, chloroquine, and hydroxychloroquine.

[0182] Aspect 9. The composition of any one of aspects 1-3, wherein the agent that decreases the acidity of endosomes is bafilomycin A.

[0183] Aspect 10. The composition of any one of aspects 1-9, wherein the RNA-guided endonuclease is a class 2 CRISPR/Cas endonuclease.

[0184] Aspect 11. The composition of aspect 10, wherein the class 2 CRISPR/Cas endonuclease is a type II CRISPR/Cas endonuclease.

[0185] Aspect 12. The composition of 10, wherein the class 2 CRISPR/Cas endonuclease is a type V or type VI CRISPR/Cas endonuclease.

[0186] Aspect 13. The composition of aspect 10, wherein the class 2 CRISPR/Cas endonuclease is a Cas9 polypeptide.

[0187] Aspect 14. The composition of aspect 10, wherein the class 2 CRISPR/Cas polypeptide is a Cpf1 polypeptide, a C2c1 polypeptide, a C2c3 polypeptide, or a C2c2 polypeptide.

[0188] Aspect 15. The composition of any one of aspects 1-9, wherein the RNA-guided endonuclease is a CasX polypeptide or a CasY polypeptide.

[0189] Aspect 16. The composition of any one of aspects 2-15, wherein the guide RNA is a single-guide RNA.

[0190] Aspect 17. The composition of any one of aspects 1-16, comprising a donor nucleic acid template.

[0191] Aspect 18. The composition of any one of aspects 3-17, wherein the RNA-guided endonuclease is a fusion RNA-guided endonuclease that comprises: a) two or more heterologous polypeptides that facilitate uptake of the RNP complex into a eukaryotic cell; and b) the RNA-guided endonuclease.

[0192] Aspect 19. The composition of aspect 18, wherein the heterologous polypeptides that facilitate uptake of the RNP into a eukaryotic cell comprise an amino acid sequence having at least 40% lysine or arginine.

[0193] Aspect 20. The composition of aspect 18 or 19, wherein the heterologous polypeptides that facilitate uptake of the RNP complex into a eukaryotic cell comprise an amino acid sequence of the formula K(K/R)X(K/R), where X is any amino acid.

[0194] Aspect 21. The composition of any one of aspects 18-20, wherein the heterologous polypeptides that facilitate uptake of the RNP complex into a eukaryotic cell comprise the amino acid sequence PKKKRKV.

[0195] Aspect 22. The composition of any one of aspects 18-21, wherein the fusion RNA-guided endonuclease comprises two heterologous polypeptides that facilitate uptake of the RNP complex into a eukaryotic cell.

[0196] Aspect 23. The composition of any one of aspects 18-21, wherein the fusion RNA-guided endonuclease comprises three heterologous polypeptides that facilitate uptake of the RNP complex into a eukaryotic cell.

[0197] Aspect 24. The composition of any one of aspects 18-21, wherein the fusion RNA-guided endonuclease comprises four heterologous polypeptides that facilitate uptake of the RNP complex into a eukaryotic cell.

[0198] Aspect 25. The composition of any one of aspects 18-21, wherein the fusion RNA-guided endonuclease comprises five heterologous polypeptides that facilitate uptake of the RNP complex into a eukaryotic cell.

[0199] Aspect 26. The composition of any one of aspects 18-21, wherein the fusion RNA-guided endonuclease comprises six heterologous polypeptides that facilitate uptake of the RNP complex into a eukaryotic cell.

[0200] Aspect 27. The composition of any one of aspects 18-26, wherein the heterologous polypeptides are fused to the N-terminus of the RNA-guided endonuclease.

[0201] Aspect 28. The composition of any one of aspects 18-26, wherein the heterologous polypeptides are fused to the C-terminus of the RNA-guided endonuclease.

[0202] Aspect 29. The composition of any one of aspects 18-26, wherein the heterologous polypeptides are fused to the N-terminus and to the C-terminus of the RNA-guided endonuclease.

[0203] Aspect 30. The composition of aspect 18, wherein the RNA-guided endonuclease is a fusion RNA-guided endonuclease that comprises, in order from N-terminus to C-terminus: a) four heterologous polypeptides that facilitate uptake of the RNP complex into a eukaryotic cell; b) the RNA-guided endonuclease; and c) two heterologous polypeptides that facilitate uptake of the RNP complex into a eukaryotic cell.

[0204] Aspect 31. A method of binding a target nucleic acid in a eukaryotic cell, the method comprising:

[0205] contacting a eukaryotic cell comprising a target nucleic acid with the composition of any of aspects 3-30, wherein the RNP enters the cell, and wherein the guide RNA and the RNA-guided endonuclease bind to the target nucleic acid in the cell.

[0206] Aspect 32. The method of aspect 31, wherein the cell is in vitro.

[0207] Aspect 33. The method of aspect 31, wherein the cell is in vivo.

[0208] Aspect 34. The method of any of aspects 31-33, wherein the RNA-guided endonuclease modulates transcription from the target nucleic acid.

[0209] Aspect 35. The method of any of aspects 31-33, wherein the RNA-guided endonuclease modifies the target nucleic acid.

[0210] Aspect 36. The method of any of aspects 31-33, wherein the RNA-guided endonuclease cleaves the target nucleic acid.

[0211] Aspect 37. The method of aspect 36, wherein the complex comprises a donor DNA template.

[0212] Aspect 38. A method of genetically modifying a eukaryotic target cell, the method comprising contacting the eukaryotic target cell with the composition of any one of aspects 3-30.

[0213] Aspect 39. The method of aspect 38, wherein the target cell is an in vivo target cell.

[0214] Aspect 40. The method of aspect 38 or aspect 39, wherein the target cell is an animal cell.

[0215] Aspect 41. The method of aspect 40, wherein the target cell is a mammalian cell.

[0216] Aspect 42. The method of aspect 41, wherein the target cell is neuron.

[0217] Aspect 43. The method of aspect 41, wherein the target cell is stem cell.

[0218] Aspect 44. The method of aspect 41, wherein the target cell is a cancer cell.

### EXAMPLES

[0219] The following examples are put forth so as to provide those of ordinary skill in the art with a complete disclosure and description of how to make and use the present invention, and are not intended to limit the scope of what the inventors regard as their invention nor are they intended to represent that the experiments below are all or the only experiments performed. Efforts have been made to ensure accuracy with respect to numbers used (e.g. amounts, temperature, etc.) but some experimental errors and deviations should be accounted for. Unless indicated otherwise, parts are parts by weight, molecular weight is weight average molecular weight, temperature is in degrees Celsius, and pressure is at or near atmospheric. Standard abbreviations may be used, e.g., bp, base pair(s); kb, kilobase(s); pl, picoliter(s); s or sec, second(s); min, minute(s); h or hr, hour(s); aa, amino acid(s); kb, kilobase(s); bp, base pair(s); nt, nucleotide(s); i.m., intramuscular(ly); i.p., intraperitoneal(ly); s.c., subcutaneous(ly); and the like.

### Example 1

### Materials and Methods:

[0220] Neural progenitor cells with a tdTomato reporter gene were pretreated with Bafilomycin A1 for 1 hour prior to addition of Cas9 RNPs outside of the cells. After 24 hours cells were washed 2× with Heparin to remove any remaining Cas9 RNP outside the cells. After 48 hours genomicDNA was collected and the target locus analyzed for Cas9-mediated targeted genomic deletions.

### Results:

[0221] The results are depicted in FIG. 1. As shown in FIG. 1, bafilomycin A1 specifically increased editing efficiency of cell penetrating Cas9 RNP, 4×NLS-Cas9-2×NLS, and had no effect on 0×NLS-Cas9-2×NLS.

[0222] While the present invention has been described with reference to the specific embodiments thereof, it should be understood by those skilled in the art that various changes may be made and equivalents may be substituted without departing from the true spirit and scope of the invention. In addition, many modifications may be made to adapt a particular situation, material, composition of matter, process, process step or steps, to the objective, spirit and scope of the present invention. All such modifications are intended to be within the scope of the claims appended hereto.

What is claimed is:

1. A composition comprising:
a) an RNA-guided endonuclease; and
b) an agent that decreases the acidity of an endosome.

2. The composition of claim 1, comprising a guide RNA comprising a segment that binds to the RNA-guided endonuclease.

3. The composition of claim 2, wherein the RNA-guided endonuclease is complexed with the guide RNA to form a ribonucleoprotein (RNP).

4. The composition of any one of claims 1-3, wherein the agent that decreases the acidity of endosomes is selected from the group consisting of amantadine, amiodarone, ammonium chloride, azithromycin, bafilomycin A1, a benzolactone enamide, bepridil, diphyllin, an indolyl, a macrolactone, monensin, nigericin, a plecomacrolide, a quinoline, and a sulfonamide.

5. The composition of any one of claims 1-3, wherein the agent that decreases the acidity of endosomes is a benzolactone enamide selected from the group consisting of salicylihalamide, lobatamide, apicularen, oximidine, and cruentaren.

6. The composition of any one of claims 1-3, wherein the agent that decreases the acidity of endosomes is a macrolactone selected from the group consisting of archazolid and azithromycin.

7. The composition of any one of claims 1-3, wherein the agent that decreases the acidity of endosomes is a plecomacrolide selected from the group consisting of bafilomycin A1 and concanamycin.

8. The composition of any one of claims 1-3, wherein the agent that decreases the acidity of endosomes is a quinoline selected from the group consisting of amodiaquine, chloroquine, and hydroxychloroquine.

9. The composition of any one of claims 1-3, wherein the agent that decreases the acidity of endosomes is bafilomycin A.

10. The composition of any one of claims 1-9, wherein the RNA-guided endonuclease is a class 2 CRISPR/Cas endonuclease.

11. The composition of claim 10, wherein the class 2 CRISPR/Cas endonuclease is a type II CRISPR/Cas endonuclease.

12. The composition of 10, wherein the class 2 CRISPR/Cas endonuclease is a type V or type VI CRISPR/Cas endonuclease.

13. The composition of claim 10, wherein the class 2 CRISPR/Cas endonuclease is a Cas9 polypeptide.

14. The composition of claim 10, wherein the class 2 CRISPR/Cas polypeptide is a Cpf1 polypeptide, a C2c1 polypeptide, a C2c3 polypeptide, or a C2c2 polypeptide.

15. The composition of any one of claims 1-9, wherein the RNA-guided endonuclease is a CasX polypeptide or a CasY polypeptide.

16. The composition of any one of claims 2-15, wherein the guide RNA is a single-guide RNA.

17. The composition of any one of claims 1-16, comprising a donor nucleic acid template.

18. The composition of any one of claims 3-17, wherein the RNA-guided endonuclease is a fusion RNA-guided endonuclease that comprises: a) two or more heterologous polypeptides that facilitate uptake of the RNP complex into a eukaryotic cell; and b) the RNA-guided endonuclease.

19. The composition of claim 18, wherein the heterologous polypeptides that facilitate uptake of the RNP into a eukaryotic cell comprise an amino acid sequence having at least 40% lysine or arginine.

20. The composition of claim 18 or 19, wherein the heterologous polypeptides that facilitate uptake of the RNP complex into a eukaryotic cell comprise an amino acid sequence of the formula K(K/R)X(K/R), where X is any amino acid.

21. The composition of any one of claims 18-20, wherein the heterologous polypeptides that facilitate uptake of the RNP complex into a eukaryotic cell comprise the amino acid sequence PKKKRKV.

22. The composition of any one of claims 18-21, wherein the fusion RNA-guided endonuclease comprises two heterologous polypeptides that facilitate uptake of the RNP complex into a eukaryotic cell.

23. The composition of any one of claims 18-21, wherein the fusion RNA-guided endonuclease comprises three heterologous polypeptides that facilitate uptake of the RNP complex into a eukaryotic cell.

24. The composition of any one of claims 18-21, wherein the fusion RNA-guided endonuclease comprises four heterologous polypeptides that facilitate uptake of the RNP complex into a eukaryotic cell.

25. The composition of any one of claims 18-21, wherein the fusion RNA-guided endonuclease comprises five heterologous polypeptides that facilitate uptake of the RNP complex into a eukaryotic cell.

26. The composition of any one of claims 18-21, wherein the fusion RNA-guided endonuclease comprises six heterologous polypeptides that facilitate uptake of the RNP complex into a eukaryotic cell.

27. The composition of any one of claims 18-26, wherein the heterologous polypeptides are fused to the N-terminus of the RNA-guided endonuclease.

28. The composition of any one of claims 18-26, wherein the heterologous polypeptides are fused to the C-terminus of the RNA-guided endonuclease.

29. The composition of any one of claims 18-26, wherein the heterologous polypeptides are fused to the N-terminus and to the C-terminus of the RNA-guided endonuclease.

30. The composition of claim 18, wherein the RNA-guided endonuclease is a fusion RNA-guided endonuclease that comprises, in order from N-terminus to C-terminus: a) four heterologous polypeptides that facilitate uptake of the RNP complex into a eukaryotic cell; b) the RNA-guided endonuclease; and c) two heterologous polypeptides that facilitate uptake of the RNP complex into a eukaryotic cell.

31. A method of binding a target nucleic acid in a eukaryotic cell, the method comprising:
contacting a eukaryotic cell comprising a target nucleic acid with the composition of any of claims 3-30, wherein the RNP enters the cell, and wherein the guide RNA and the RNA-guided endonuclease bind to the target nucleic acid in the cell.

32. The method of claim 31, wherein the cell is in vitro.

33. The method of claim 31, wherein the cell is in vivo.

34. The method of any of claims 31-33, wherein the RNA-guided endonuclease modulates transcription from the target nucleic acid.

35. The method of any of claims 31-33, wherein the RNA-guided endonuclease modifies the target nucleic acid.

36. The method of any of claims 31-33, wherein the RNA-guided endonuclease cleaves the target nucleic acid.

37. The method of claim 36, wherein the complex comprises a donor DNA template.

38. A method of genetically modifying a eukaryotic target cell, the method comprising contacting the eukaryotic target cell with the composition of any one of claims 3-30.

39. The method of claim 38, wherein the target cell is an in vivo target cell.

40. The method of claim 38 or claim 39, wherein the target cell is an animal cell.

41. The method of claim 40, wherein the target cell is a mammalian cell.

42. The method of claim 41, wherein the target cell is neuron.

43. The method of claim 41, wherein the target cell is stem cell.

44. The method of claim 41, wherein the target cell is a cancer cell.

The application's sequence listing, which the Patent Office published only in electronic form, follows.

SEQUENCE LISTING (1282 sequences)

SEQ ID NO: 1 - protein, 15 aa, Artificial sequence
  Synthetic Sequence
IGLDIGTNSVGWAVI

SEQ ID NO: 2 - protein, 8 aa, Artificial sequence
  Synthetic Sequence
IVIEMARE

SEQ ID NO: 3 - protein, 27 aa, Artificial sequence
  Synthetic Sequence
DVDHIVPQSFLKDDSIDNKVLTRSDKN

SEQ ID NO: 4 - protein, 8 aa, Artificial sequence
  Synthetic Sequence
HHAHDAYL

SEQ ID NO: 5 - protein, 1368 aa, Streptococcus pyogenes [sequence omitted]

SEQ ID NO: 6 - protein, 1367 aa, Streptococcus pyogenes
MDKKYSIGLDIGTNSVGWAVITDDYKVPSKKLKVLGNTDRHGIKKNLIGALLFDSGETAEATRLKRTARRRYTRRKNRICYLQEIFSNEMAKVDDSFFHRLEESFLVEEDKKHERHPIFGNIVDEVAYHEKYPTIYHLRKKLADSTDKVDLRLIYLALAHMIKFRGHFLIEGDLNPDNSDVDKLFIQLVQTYNQLFEENPINASRVDAKAILSARLSKSRRLENLIAQLPGEKKNGLFGNLIALSLGLTPNFKSNFDLAEDAKLQLSKDTYDDDLDNLLAQIGDQYADLFLAAKNLSDAILLSDILRVNSEITKAPLSASMIKRYDEHHQDLTLLKALVRQQLPEKYKEIFFDQSKNGYAGYIDGGASQEEFYKFIKPILEKMDGTEELLAKLNREDLLRKQRTFDNGSIPYQIHLGELHAILRRQEDFYPFLKDNREKIEKILTFRIPYYVGPLARGNSRFAWMTRKSEETITPWNFEEVVDKGASAQSFIERMTNFDKNLPNEKVLPKHSLLYEYFTVYNELTKVKYVTEGMRKPAFLSGEQKKAIVDLLFKTNRKVTVKQLKEDYFKKIECFDSVEISGVEDRFNTSLGTYHDLLKIIKDKDFLDNEENEDILEDIVLTLTLFEDKEMIEERLKKYANLFDDKVMKQLKRRHYTGWGRLSRKLINGIRDKQSGKTILDFLKSDGFANRNFMQLINDDSLTFKEAIQKAQVSGQGHSLHEQIANLAGSPAIKKGILQTVKIVDELVKVMGHKPENIVIEMARENQTTQKGQKNSRERMKRIEEGIKELGSQILKEHPVENTQLQNEKLYLYYLQNGRDMYVDQELDINRLSDYDVDHIVPQSFLKDDSIDNKVLTRSDKNRGKSDNVPSEEVVKKMKNYWRQLLNAKLITQRKFDNLTKAERGGLSELDKAGFIKRQLVETRQITKHVAQILDSRMNTKYDENDKLIREVKVITLKSKLVSDFRKDFQFYKVREINNYHHAHDAYLNAVVGTALIKKYPKLESEFVYGDYKVYDVRKMIAKSEQEIGKATAKYFFYSNIMNFFKTEITLANGEIRKRPLIETNGETGEIVWDKGRDFATVRKVLSMPQVNIVKKTEVQTGGFSKESILPKRNSDKLIARKKDWDPKKYGGFDSPTVAYSVLVVAKVEKGKSKKLKSVKELLGITIMERSSFEKNPIDFLEAKGYKEVRKDLIIKLPKYSLFELENGRKRMLASAGELQKGNELALPSKYVNFLYLASHYEKLKGSPEDNEQKQLFVEQHKHYLDEIIEQISEFSKRVILADANLDKVLSAYNKHRDKPIREQAKNIIHLFTLTNLGAPAAFKYFDTTIERNRYKSIKEVLDATLIHQSITGLYEIRIDLSQLGGD

SEQ ID NO: 7 - protein, 1056 aa, Pasteurella multocida
MQTTNLSYILGLDLGIASVGWAVVEINENEDPIGLIDVGVRIFERAEVPKTGESLALSRRLARSTRRLIRRRAHRLLLAKRFLKREGILSTIDLEKGLPNQAWELRVAGLERRLSAIEWGAVLLHLIKHRGYLSKRKNESQTNNKELGALLSGVAQNHQLLQSDDYRTPAELALKKFAKEEGHIRNQRGAYTHTFNRLDLLAELNLLFAQQHQFGNPHCKEHIQQYMTELLMWQKPALSGEAILKMLGKCTHEKNEFKAAKHTYSAERFVWLTKLNNLRILEDGAERALNEEERQLLINHPYEKSKLTYAQVRKLLGLSEQAIFKHLRYSKENAESATFMELKAWHAIRKALENQGLKDTWQDLAKKPDLLDEIGTAFSLYKTDEDIQQYLTNKVPNSVINALLVSLNFDKFIELSLKSLRKILPLMEQGKRYDQACREIYGHHYGEANQKTSQLLPAIPAQEIRNPVVLRTLSQARKVINAIIRQYGSPARVHIETGRELGKSFKERREIQKQQEDNRTKRESAVQKFKELFSDFSSEPKSKDILKFRLYEQQHGKCLYSGKEINIHRLNEKGYVEIDHALPFSRTWDDSFNNKVLVLASENQNKGNQTPYEWLQGKINSERWKNFVALVLGSQCSAAKKQRLLTQVIDDNKFIDRNLNDTRYIARFLSNYIQENLLLVGKNKKNVFTPNGQITALLRSRWGLIKARENNNRHHALDAIVVACATPSMQQKITRFIRFKEVHPYKIENRYEMVDQESGEIISPHFPEPWAYFRQEVNIRVFDNHPDTVLKEMLPDRPQANHQFVQPLFVSRAPTRKMSGQGHMETIKSAKRLAEGISVLRIPLTQLKPNLLENMVNKEREPALYAGLKARLAEFNQDPAKAFATPFYKQGGQQVKAIRVEQVQKSGVLVRENNGVADNASIVRTDVFIKNNKFFLVPIYTWQVAKGILPNKAIVAHKNEDEWEEMDEGAKFKFSLFPNDLVELKTKKEYFFGYYIGLDRATGNISLKEHDGEISKGKDGVYRVGVKLALSFEKYQVDELGKNRQICRPQQRQPVR

SEQ ID NO: 8 - protein, 1368 aa, Streptococcus pyogenes
MDKKYSIGLDIGTNSVGWAVITDDYKVPSKKLKGLGNTDRHGIKKNLIGALLFDSGETAEATRLKRTARRRYTRRKNRICYLQEIFSNEMAKVDDSFFHRLEESFLVEEDKKHERHPIFGNIVDEVAYHEKYPTIYHLRKKLADSTDKVDLRLIYLALAHMIKFRGHFLIEGDLNPDNSDVDKLFIQLVQTYNQLFEENPINASRVDAKAILSARLSKSRRLENLIAQLPGEKKNGLFGNLIALSLGLTPNFKSNFDLAEDAKLQLSKDTYDDDLDNLLAQIGDQYADLFLAAKNLSDATLLSDILRVNSEITKAPLSASMIKRYDEHHQDLTLLKALVRQQLPEKYKEIFFDQSKNGYAGYIDGGASQEEFYKFIKPILEKMDGTEELLAKLNREDLLRKQRTFDNGSIPYQIHLGELHAILRRQEDFYPFLKDNREKIEKILTFRIPYYVGPLARGNSRFAWMTRKSEETITPWNFEEVVDKGASAQSFIERMTNFDKNLPNEKVLPKHSLLYEYFTVYNELTKVKYVTEGMRKPAFLSGEQKKAIVDLLFKTNRKVTVKQLKEDYFKKIECFDSVEISGVEDRFNASLGTYHDLLKIIKDKDFLDNEENEDILEDIVLTLTLFEDREMIEERLKTYAHLFDDKVMKQLKRRRYTGWGRLSRKLINGIRDKQSGKTILDFLKSDGFANRNFMQLIHDDSLTFKEDIQKAQVSGQGDSLHEHIANLAGSPAIKKGILQTVKVVDELVKVMGRHKPENIVIEMARENQTTQKGQKNSRERMKRIEEGIKELGSDILKEYPVENTQLQNEKLYLYYLQNGRDMYVDQELDINRLSDYDVDHIVPQSFLKDDSIDNKVLTRSDKNRGKSDNVPSEEVVKKMKNYWRQLLNAKLITQRKFDNLTKAERGGLSELDKVGFIKRQLVETRQITKHVAQILDSRMNTKYDENDKLIREVRVITLKSKLVSDFRKDFQFYKVREINNYHHAHDAYLNAVVGTALIKKYPKLESEFVYGDYKVYDVRKMIAKSEQEIGKATAKYFFYSNIMNFFKTEITLANGEIRKRPLIETNGETGEIVWDKGRDFATVRKVLSMPQVNIVKKTEVQTGGFSKESILPKRNSDKLIARKKDWDPKKYGGFDSPTVAYSVLVVAKVEKGKSKKLKSVKELLGITIMERSSFEKDPIDFLEAKGYKEVRKDLIIKLPKYSLFELENGRKRMLASAGELQKGNELALPSKYVNFLYLASHYEKLKGSPEDNEQKQLFVEQHKHYLDEIIEQISEFSKRVILADANLDKVLSAYNKHRDKPIREQAENIIHLFTLTNLGAPAAFKYFDTTIDRKRYTSTKEVLDATLIHQSITGLYETRIDLSQLGGD

SEQ ID NO: 9 - protein, 1334 aa, Listeria innocua
MKKPYTIGLDIGTNSVGWAVLTDQYDLVKRKMKIAGDSEKKQIKKNFWGVRLFDEGQTAADRRMARTARRRIERRRNRISYLQGIFAEEMSKTDANFFCRLSDSFYVDNEKRNSRHPFFATIEEEVEYHKNYPTIYHLREELVNSSEKADLRLVYLALAHIIKYRGNFLIEGALDTQNTSVDGIYKQFIQTYNQVFASGIEDGSLKKLEDNKDVAKILVEKVTRKEKLERILKLYPGEKSAGMFAQFISLIVGSKGNFQKPFDLIEKSDIECAKDSYEEDLESLLALIGDEYAELFVAAKNAYSAVVLSSIITVAETETNAKLSASMIERFDTHEEDLGELKAFIKLHLPKHYEEIFSNTEKHGYAGYIDGKTKQADFYKYMKMTLENIEGADYFIAKIEKENFLRKQRTFDNGAIPHQLHLEELEAILHQQAKYYPFLKENYDKIKSLVTFRIPYFVGPLANGQSEFAWLTRKADGEIRPWNIEEKVDFGKSAVDFIEKMTNKDTYLPKENVLPKHSLCYQKYLVYNELTKVRYINDQGKTSYFSGQEKEQIFNDLFKQKRKVKKKDLELFLRNMSHVESPTIEGLEDSFNSSYSTYHDLLKVGIKQEILDNPVNTEMLENIVKILTVFEDKRMIKEQLQQFSDVLDGVVLKKLERRHYTGWGRLSAKLLMGIRDKQSHLTILDYLMNDDGLNRNLMQLINDSNLSFKSIIEKEQVTTADKDIQSIVADLAGSPAIKKGILQSLKIVDELVSVMGYPPQTIVVEMARENQTTGKGKNNSRPRYKSLEKAIKEFGSQILKEHPTDNQELRNNRLYLYYLQNGKDMYTGQDLDIHNLSNYDIDHIVPQSFITDNSIDNLVLTSSAGNREKGDDVPPLEIVRKRKVFWEKLYQGNLMSKRKFDYLTKAERGGLTEADKARFIHRQLVETRQITKNVANILHQRFNYEKDDHGNTMKQVRIVTLKSALVSQFRKQFQLYKVRDVNDYHHAHDAYLNGVVANTLLKVYPQLEPEFVYGDYHQFDWFKANKATAKKQFYTNIMLFFAQKDRIIDENGEILWDKKYLDTVKKVMSYRQMNIVKKTEIQKGEFSKATIKPKGNSSKLIPRKTNWDPMKYGGLDSPNMAYAVVIEYAKGKNKLVFEKKIIRVTIMERKAFEKDEKAFLEEQGYRQPKVLAKLPKYTLYECEEGRRRMLASANEAQKGNQQVLPNHLVTLLHHAANCEVSDGKSLDYIESNREMFAELLAHVSEFAKRYTLAEANLNKINQLFEQNKEGDIKAIAQSFVDLMAFNAMGAPASFKFFETTIERKRYNNLKELLNSTIIYQSITGLYESRKRLDD

SEQ ID NO: 10 - protein, 1368 aa, Streptococcus pyogenes; identical to SEQ ID NO: 8

SEQ ID NO: 11 - protein, 1370 aa, Streptococcus agalactiae
MNKPYSIGLDIGTNSVGWSIITDDYKVPAKKMRVLGNTDKEYIKKNLIGALLFDGGNTAADRRLKRTARRRYTRRRNRILYLQEIFAEEMSKVDDSFFHRLEDSFLVEEDKRGSKYPIFATLQEEKDYHEKFSTIYHLRKELADKKEKADLRLIYIALAHIIKFRGHFLIEDDSFDVRNTDISKQYQDFLEIFNTTFENNDLLSQNVDVEAILTDKISKSAKKDRILAQYPNQKSTGIFAEFLKLIVGNQADFKKYFNLEDKTPLQFAKDSYDEDLENLLGQIGDEFADLFSAAKKLYDSVLLSGILTVIDLSTKAPLSASMIQRYDEHREDLKQLKQFVKASLPEKYQEIFADSSKDGYAGYIEGKTNQEAFYKYLSKLLTKQEDSENFLEKIKNEDFLRKQRTFDNGSIPHQVHLTELKAIIRRQSEYYPFLKENQDRIEKILTFRIPYYIGPLAREKSDFAWMTRKTDDSIRPWNFEDLVDKEKSAEAFIHRMTNNDFYLPEEKVLPKHSLIYEKFTVYNELTKVRYKNEQGETYFFDSNIKQEIFDGVFKEHRKVSKKKLLDFLAKEYEEFRIVDVIGLDKENKAFNASLGTYHDLEKILDKDFLDNPDNESILEDIVQTLTLFEDREMIKKRLENYKDLFTESQLKKLYRRHYTGWGRLSAKLINGIRDKESQKTILDYLIDDGRSNRNFMQLINDDGLSFKSIISKAQAGSHSDNLKEVVGELAGSPAIKKGILQSLKIVDELVKVMGYEPEQIVVEMARENQTTNQGRRNSRQRYKLLDDGVKNLASDLNGNILKEYPTDNQALQNERLFLYYLQNGRDMYTGEALDIDNLSQYDIDHIIPQAFIKDDSIDNRVLVSSAKNRGKSDDVPSLEIVKDCKVFWKKLLDAKLMSQRKYDNLTKAERGGLTSDDKARFIQRQLVETRQITKHVARILDERFNNELDSKGRRIRKVKIVTLKSNLVSNFRKEFGFYKIREVNNYHHAHDAYLNAVVAKAILTKYPQLEPEFVYGDYPKYNSYKTRKSATEKLFFYSNIMNFFKTKVTLADGTVVVKDDIEVNNDTGEIVWDKKKHFATVRKVLSYPQNNIVKKTEIQTGGFSKESILAHGNSDKLIPRKTKDIYLDPKKYGGFDSPIVAYSVLVVADIKKGKAQKLKTVTELLGITIMERSRFEKNPSAFLESKGYLNIRADKLIILPKYSLFELENGRRRLLASAGELQKGNELALPTQFMKFLYLASRYNESKGKPEEIEKKQEFVNQHVSYFDDILQLINDFSKRVILADANLEKINKLYQDNKENISVDELANNIINLFTFTSLGAPAAFKFFDKIVDRKRYTSTKEVLNSTLIHQSITGLYETRIDLGKLGED

SEQ ID NO: 12 - protein, 1345 aa, Streptococcus mutans
MKKPYSIGLDIGTNSVGWAVVTDDYKVPAKKMKVLGNTDKSHIEKNLLGALLFDSGNTAEDRRLKRTARRRYTRRRNRILYLQEIFSEEMGKVDDSFFHRLEDSFLVTEDKRGERHPIFGNLEEEVKYHENFPTIYHLRQYLADNPEKVDLRLVYLALAHIIKFRGHFLIEGKFDTRNNDVQRLFQEFLAVYDNTFENSSLQEQNVQVEEILTDKISKSAKKDRVLKLFPNEKSNGRFAEFLKLIVGNQADFKKHFELEEKAPLQFSKDTYEEELEVLLAQIGDNYAELFLSAKKLYDSILLSGILTVTDVGTKAPLSASMIQRYNEHQMDLAQLKQFIRQKLSDKYNEVFSDVSKDGYAGYIDGKTNQEAFYKYLKGLLNKIEGSGYFLDKIEREDFLRKQRTFDNGSIPHQIHLQEMRAIIRRQAEFYPFLADNQDRIEKLLTFRIPYYVGPLARGKSDFAWLSRKSADKITPWNFDEIVDKESSAEAFINRMTNYDLYLPNQKVLPKHSLLYEKFTVYNELTKVKYKTEQGKTAFFDANMKQEIFDGVFKVYRKVTKDKLMDFLEKEFDEFRIVDLTGLDKENKVFNASYGTYHDLCKILDKDFLDNSKNEKILEDIVLTLTLFEDREMIRKRLENYSDLLTKEQVKKLERRHYTGWGRLSAELIHGIRNKESRKTILDYLIDDGNSNRNFMQLINDDALSFKEEIAKAQVIGETDNLNQVVSDIAGSPAIKKGILQSLKIVDELVKIMGHQPENIVVEMARENQFTNQGRRNSQQRLKGLTDSIKEFGSQILKEHPVENSQLQNDRLFLYYLQNGRDMYTGEELDIDYLSQYDIDHIIPQAFIKDNSIDNRVLTSSKENRGKSDDVPSKDVVRKMKSYWSKLLSAKLITQRKFDNLTKAERGGLTDDDKAGFIKRQLVETRQITKHVARILDERFNTETDENNKKIRQVKIVTLKSNLVSNFRKEFELYKVREINDYHHAHDAYLNAVIGKALLGVYPQLEPEFVYGDYPHFHGHKENKATAKKFFYSNIMNFFKKDDVRTDKNGEIIWKKDEHISNIKKVLSYPQVNIVKKVEEQTGGFSKESILPKGNSDKLIPRKTKKFYWDTKKYGGFDSPIVAYSILVIADIEKGKSKKLKTVKALVGVTIMEKMTFERDPVAFLERKGYRNVQEENIIKLPKYSLFKLENGRKRLLASARELQKGNEIVLPNHLGTLLYHAKNIHKVDEPKHLDYVDKHKDEFKELLDVVSNFSKKYTLAEGNLEKIKELYAQNNGEDLKELASSFINLLTFTAIGAPATFKFFDKNIDRKRYTSTTEILNATLIHQSITGLYETRIDLNKLGGD

SEQ ID NO: 13 - protein, 1377 aa, Streptococcus agalactiae
MNKPYSIGLDIGTNSVGWSIITDDYKVPAKKMRVLGNTDKEYIKKNLIGALLFDGGNTAADRRLKRTARRRYTRRRNRILYLQEIFAEEMSKVDDSFFHRLEDSFLVEEDKRGSKYPIFATMQEEKYYHEKFPTIYHLRKELADKKEKADLRLVYLALAHIIKFRGHFLIEDDRFDVRNTDIQKQYQAFLEIFDTTFENNHLLSQNVDVEAILTDKISKSAKKDRILAQYPNQKSTGIFAEFLKLIVGNQADFKKHFNLEDKTPLQFAKDSYDEDLENLLGQIGDEFADLFSVAKKLYDSVLLSGILTVTDLSTKAPLSASMIQRYDEHHEDLKHLKQFVKASLPENYREVFADSSKDGYAGYIEGKTNQEAFYKYLLKLLTKQEGSEYFLEKIKNEDFLRKQRTFDNGSIPHQVHLTELRAIIRRQSEYYPFLKENQDRIEKILTFRIPYYVGPLAREKSDFAWMTRKTDDSIRPWNFEDLVDKEKSAEAFIHRMTNNDLYLPEEKVLPKHSLIYEKFTVYNELTKVRFLAEGFKDFQFLNRKQKETIFNSLFKEKRKVTEKDIISFLNKVDGYEGIAIKGIEKQFNASLSTYHDLKKILGKDFLDNTDNELILEDIVQTLTLFEDREMIKKCLDIYKDFFTESQLKKLYRRHYTGWGRLSAKLINGIRNKENQKTILDYLIDDGSANRNFMQLINDDDLSFKPIIDKARTGSHSDNLKEVVGELAGSPAIKKGILQSLKIVDELVKVMGYEPEQIVVEMARENQTTAKGLSRSRQRLTTLRESLANLKSNILEEKKPKYVKDQVENHHLSDDRLFLYYLQNGRDMYTKKALDIDNLSQYDIDHIIPQAFIKDDSIDNRVLVSSAKNRGKSDDVPSIEIVKARKMFWKNLLDAKLMSQRKYDNLTKAERGGLTSDDKARFIQRQLVETRQITKHVARILDERFNNEVDNGKKICKVKIVTLKSNLVSNFRKEFGFYKIREVNDYHHAHDAYLNAVVAKAILTKYPQLEPEFVYGMYRQKKLSKIVHEDKEEKYSEATRKMFFYSNLMNMFKRVVRLADGSIVVRPVIETGRYMRKTAWDKKKHFATVRKVLSYPQNNIVKKTEIQTGGFSKESILAHGNSDKLIPRKTKDIYLDPKKYGGFDSPIVAYSVLVVADIKKGKAQKLKTVTELLGITIMERSRFEKNPSAFLESKGYLNIRDDKLMILPKYSLFELENGRRRLLASAGELQKGNELALPTQFMKFLYLASRYNESKGKPEEIEKKQEFVNQHVSYFDDILQLINDFSKRVILADANLEKINKLYQDNKENIPVDELANNIINLFTFTSLGAPAAFKFFDKIVDRKRYTSTKEVLNSTLIHQSITGLYETRIDLGKLGED

SEQ ID NO: 14 - protein, 131 aa, Helicobacter hepaticus
MRILGFDIGITSIGWAYVESNELKDCGVRIFTKAENPKNGDSLAAPRREARGARRRLARRKARLNAIKRLLCKEFELNLNDYLANDGELPKAYQTSKDTKSPYELYTAFHWIIFAFCSIASSLSNRQMLPI

SEQ ID NO: 15 - protein, 1059 aa, Wolinella succinogenes
MIERILGVDLGISSLGWAIVEYDKDDEAANRIIDCGVRLFTAAETPKKKESPNKARREARGIRRVLNRRRVRMNMIKKLFLRAGLIQDVDLDGEGGMFYSKANRADVWELRHDGLYRLLKGDELARVLIHIAKHRGYKFIGDDEADEESGKVKKAGVVLRQNFEAAGCRTVGEWLWRERGANGKKRNKHGDYEISIHRDLLVEEVEAIFVAQQEMRSTIATDALKAAYREIAFFVRPMQRIEKMVGHCTYFPEERRAPKSAPTAEKFIAISKFFSTVIIDNEGWEQKIIERKTLEELLDFAVSREKVEFRHLRKFLDLSDNEIFKGLHYKGKPKTAKKREATLFDPNEPTELEFDKVEAEKKAWISLRGAAKLREALGNEFYGRFVALGKHADEATKILTYYKDEGQKRRELTKLPLEAEMVERLVKIGFSDFLKLSLKAIRDILPAMESGARYDEAVLMLGVPHKEKSAILPPLNKTDIDILNPTVIRAFAQFRKVANALVRKYGAFDRVHFELAREINTKGEIEDIKESQRKNEKERKEAADWIAETSFQVPLTRKNILKKRLYIQQDGRCAYTGDVIELERLFDEGYCEIDHILPRSRSADDSFANKVLCLARANQQKTDRTPYEWFGHDAARWNAFETRTSAPSNRVRTGKGKIDRLLKKNFDENSEMAFKDRNLNDTRYMARAIKTYCEQYWVFKNSHTKAPVQVRSGKLTSVLRYQWGLESKDRESHTHHAVDAIIIAFSTQGMVQKLSEYYRFKETHREKERPKLAVPLANFRDAVEEATRIENTETVKEGVEVKRLLISRPPRARVTGQAHEQTAKPYPRIKQVKNKKKWRLAPIDEEKFESFKADRVASANQKNFYETSTIPRVDVYHKKGKFHLVPIYLHEMVLNELPNLSLGTNPEAMDENFFKFSIFKDDLISIQTQGTPKKPAKIIMGYFKNMHGANMVLSSINNSPCEGFTCTPVSMDKKHKDKCKLCPEENRIAGRCLQGFLDYWSQEGLRPPRKEFECDQGVKFALDVKKYQIDPLGYYYEVKQEKRLGTIPQMRSAKKLVKK

SEQ ID NO: 16 - protein, 1409 aa, Wolinella succinogenes
MLVSPISVDLGGKNTGFFSFTDSLDNSQSGTVIYDESFVLSQVGRRSKRHSKRNNLRNKLVKRLFLLILQEHHGLSIDVLPDEIRGLFNKRGYTYAGFELDEKKKDALESDTLKEFLSEKLQSIDRDSDVEDFLNQIASNAESFKDYKKGFEAVFASATHSPNKKLELKDELKSEYGENAKELLAGLRVTKEILDEFDKQENQGNLPRAKYFEELGEYIATNEKVKSFFDSNSLKLTDMTKLIGNISNYQLKELRRYFNDKEMEKGDIWIPNKLHKITERFVRSWHPKNDADRQRRAELMKDLKSKEIMELLTTTEPVMTIPPYDDMNNRGAVKCQTLRLNEEYLDKHLPNWRDIAKRLNHGKFNDDLADSTVKGYSEDSTLLHRLLDTSKEIDIYELRGKKPNELLVKTLGQSDANRLYGFAQNYYELIRQKVRAGIWVPVKNKDDSLNLEDNSNMLKRCNHNPPHKKNQIHNLVAGILGVKLDEAKFAEFEKELWSAKVGNKKLSAYCKNIEELRKTHGNTFKIDIEELRKKDPAELSKEEKAKLRLTDDVILNEWSQKIANFFDIDDKHRQRFNNLFSMAQLHTVIDTPRSGFSSTCKRCTAENRFRSETAFYNDETGEFHKKATATCQRLPADTQRPFSGKIERYIDKLGYELAKIKAKELEGMEAKEIKVPIILEQNAFEYEESLRKSKTGSNDRVINSKKDRDGKKLAKAKENAEDRLKDKDKRIKAFSSGICPYCGDTIGDDGEIDHILPRSHTLKIYGTVFNPEGNLIYVHQKCNQAKADSIYKLSDIKAGVSAQWIEEQVANIKGYKTFSVLSAEQQKAFRYALFLQNDNEAYKKVVDWLRTDQSARVNGTQKYLAKKIQEKLTKMLPNKHLSFEFILADATEVSELRRQYARQNPLLAKAEKQAPSSHAIDAVMAFVARYQKVFKDGTPPNADEVAKLAMLDSWNPASNEPLTKGLSTNQKIEKMIKSGDYGQKNMREVFGKSIFGENAIGERYKPIVVQEGGYYIGYPATVKKGYELKNCKVVTSKNDIAKLEKIIKNQDLISLKENQYIKIFSINKQTISELSNRYFNMNYKNLVERDKEIVGLLEFIVENCRYYTKKVDVKFAPKYIHETKYPFYDDWRRFDEAWRYLQENQNKTSSKDRFVIDKSSLNEYYQPDKNEYKLDVDTQPIWDDFCRWYFLDRYKTANDKKSIRIKARKTFSLLAESGVQGKVFRAKRKIPTGYAYQALPMDNNVIAGDYANILLEANSKTLSLVPKSGISIEKQLDKKLDVIKKTDVRGLAIDNNSFFNADFDTHGIRLIVENTSVKVGNFPISAIDKSAKRMIFRALFEKEKGKRKKKTTISFKESGPVQDYLKVFLKKIVKIQLRTDGSISNIVVRKNAADFTLSFRSEHIQKLLK

SEQ ID NO: 17 - protein, 1374 aa, Fusobacterium nucleatum
MKKQKFSDYYLGFDIGTNSVGWCVTDLDYNVLRFNKKDMWGSRLFDEAKTAAERRVQRNSRRRLKRRKWRLNLLEEIFSDEIMKIDSNFFRRLKESSLWLEDKNSKEKFTLFNDDNYKDYDFYKQYPTIFHLRDELIKNPEKKDIRLIYLALHSIFKSRGHFLFEGQNLKEIKNFETLYNNLISFLEDNGINKSIDKDNIEKLEKIICDSGKGLKDKEKEFKGIFNSDKQLVAIFKLSVGSSVSLNDLFDTDEYKKEEVEKEKISFREQIYEDDKPIYYSILGEKIELLDIAKSFYDFMVLNNILSDSNYISEAKVKLYEEHKKDLKNLKYIIRKYNKENYDKLFKDKNENNYPAYIGLNKEKDKKEVVEKSRLKIDDLIKVIKGYLPKPERIEEKDKTIFNEILNKIELKTILPKQRISDNGTLPYQIHEVELEKILENQSKYYDFLNYEENGVSTKDKLLKTFKFRIPYYVGPLNSYHKDKGGNSWIVRKEEGKILPWNFEQKVDIEKSAEEFIKRMTNKCTYLNGEDVIPKDSFLYSEYIILNELNKVQVNDEFLNEENKRKIIDELFKENKKVSEKKFKEYLLVNQIANRTVELKGIKDSFNSNYVSYIKFKDIFGEKLNLDIYKEISEKSILWKCLYGDDKKIFEKKIKNEYGDILNKDEIKKINSFKFNTWGRLSEKLLTGIEFINLETGECYSSVMEALRRTNYNLMELLSSKFTLQESIDNENKEMNEVSYRDLIEESYVSPSLKRAILQTLKIYEEIKKITGRVPKKVFIEMARGGDESMKNKKIPARQEQLKKLYDSCGNDIANFSIDIKEMKNSLSSYDNNSLRQKKLYLYYLQFGKCMYTGREIDLDRLLQNNDTYDIDHIYPRSKVIKDDSFDNLVLVLKNENAEKSNEYPVKKEIQEKMKSFWRFLKEKNFISDEKYKRLTGKDDFELRGFMARQLVNVRQTTKEVGKILQQIEPEIKIVYSKAEIASSFREMFDFIKVRELNDTHHAKDAYLNIVAGNVYNTKFTEKPYRYLQEIKENYDVKKIYNYDIKNAWDKENSLEIVKKNMEKNTVNITRFIKEEKGELFNLNPIKKGETSNEIISIKPKLYDGKDNKLNEKYGYYTSLKAAYFIYVEHEKKNKKVKTFERITRIDSTLIKNEKNLIKYLVSQKKLLNPKIIKKIYKEQTLIIDSYPYTFTGVDSNKKVELKNKKQLYLEKKYEQILKNALKFVEDNQGETEENYKFIYLKKRNNNEKNETIDAVKERYNIEFNEMYDKFLEKLSSKDYKNYINNKLYTNFLNSKEKFKKLKLWEKSLILREFLKIFNKNTYGKYEIKDSQTKEKLFSFPEDTGRIRLGQSSLGNNKELLEESVTGLFVKKIKL

SEQ ID NO: 18 - protein, 1084 aa, Corynebacterium diphtheriae
MKYHVGIDVGTFSVGLAAIEVDDAGMPIKTLSLVSHIHDSGLDPDEIKSAVTRLASSGIARRTRRLYRRKRRRLQQLDKFIQRQGWPVIELEDYSDPLYPWKVRAELAASYIADEKERGEKLSVALRHIARHRGWRNPYAKVSSLYLPDGPSDAFKAIREEIKRASGQPVPETATVGQMVTLCELGTLKLRGEGGVLSARLQQSDYAREIQEICRMQEIGQELYRKIIDVVFAAESPKGSASSRVGKDPLQPGKNRALKASDAFQRYRIAALIGNLRVRVDGEKRILSVEEKNLVFDHLVNLTPKKEPEWVTIAEILGIDRGQLIGTATMTDDGERAGARPPTHDTNRSIVNSRIAPLVDWWKTASALEQHAMVKALSNAEVDDFDSPEGAKVQAFFADLDDDVHAKLDSLHLPVGRAAYSEDTLVRLTRRMLSDGVDLYTARLQEFGIEPSWTPPTPRIGEPVGNPAVDRVLKTVSRWLESATKTWGAPERVIIEHVREGFVTEKRAREMDGDMRRRAARNAKLFQEMQEKLNVQGKPSRADLWRYQSVQRQNCQCAYCGSPITFSNSEMDHIVPRAGQGSTNTRENLVAVCHRCNQSKGNTPFAIWAKNTSIEGVSVKEAVERTRHWVTDTGMRSTDFKKFTKAVVERFQRATMDEEIDARSMESVAWMANELRSRVAQHFASHGTTVRVYRGSLTAEARRASGISGKLKFFDGVGKSRLDRRHHAIDAAVIAFTSDYVAETLAVRSNLKQSQAHRQEAPQWREFTGKDAEHRAAWRVWCQKMEKLSALLTEDLRDDRVVVMSNVRLRLGNGSAHKETIGKLSKVKLSSQLSVSDIDKASSEALWCALTREPGFDPKEGLPANPERHIRVNGTHVYAGDNIGLFPVSAGSIALRGGYAELGSSFHHARVYKITSGKKPAFAMLRVYTIDLLPYRNQDLFSVELKPQTMSMRQAEKKLRDALATGNAEYLGWLVVDDELVVDTSKIATDQVKAVEAELGTIRRWRVDGFFSPSKLRLRPLQMSKEGIKKESAPELSKIIDRPGWLPAVNKLFSDGNVTVVRRDSLGRVRLESTAHLPVTWKVQ

SEQ ID NO: 19 - protein, 1395 aa, Treponema denticola
MKKEIKDYFLGLDVGTGSVGWAVTDTDYKLLKANRKDLWGMRCFETAETAEVRRLHRGARRRIERRKKRIKLLQELFSQEIAKTDEGFFQRMKESPFYAEDKTILQENTLFNDKDFADKTYHKAYPTINHLIKAWIENKVKPDPRLLYLACHNIIKKRGHFLFEGDFDSENQFDTSIQALFEYLREDMEVDIDADSQKVKEILKDSSLKNSEKQSRLNKILGLKPSDKQKKAITNLISGNKINFADLYDNPDLKDAEKNSISFSKDDFDALSDDLASILGDSFELLLKAKAVYNCSVLSKVIGDEQYLSFAKVKIYEKHKTDLTKLKNVIKKHFPKDYKKVFGYNKNEKNNNNYSGYVGVCKTKSKKLIINNSVNQEDFYKFLKTILSAKSEIKEVNDILTEIETGTFLPKQISKSNAEIPYQLRKMELEKILSNAEKHFSFLKQKDEKGLSHSEKIIMLLTFKIPYYIGPINDNHKKFFPDRCWVVKKEKSPSGKTTPWNFFDHIDKEKTAEAFITSRTNFCTYLVGESVLPKSSLLYSEYTVLNEINNLQIIIDGKNICDIKLKQKIYEDLFKKYKKITQKQISTFIKHEGICNKTDEVIILGIDKECTSSLKSYIELKNIFGKQVDEISTKNMLEEIIRWATIYDEGEGKTILKTKIKAEYGKYCSDEQIKKILNLKFSGWGRLSRKFLETVTSEMPGFSEPVNIITAMRETQNNLMELLSSEFTFTENIKKINSGFEDAEKQFSYDGLVKPLFLSPSVKKMLWQTLKLVKEISHITQAPPKKIFIEMAKGAELEPARTKTRLKILQDLYNNCKNDADAFSSEIKDLSGKIENEDNLRLRSDKLYLYYTQLGKCMYCGKPIEIGHVFDTSNYDIDHIYPQSKIKDDSISNRVLVCSSCNKNKEDKYPLKSEIQSKQRGFWNFLQRNNFISLEKLNRLTRATPISDDETAKFIARQLVETRQATKVAAKVLEKMFPETKIVYSKAETVSMFRNKFDIVKCREINDFHHAHDAYLNIVVGNVYNTKFTNNPWNFIKEKRDNPKIADTYNYYKVFDYDVKRNNITAWEKGKTIITVKDMLKRNTPIYTRQAACKKGELFNQTIMKKGLGQHPLKKEGPFSNISKYGGYNKVSAAYYTLIEYEEKGNKIRSLETIPLYLVKDIQKDQDVLKSYLTDLLGKKEFKILVPKIKINSLLKINGFPCHITGKTNDSFLLRPAVQFCCSNNEVLYFKKIIRFSEIRSQREKIGKTISPYEDLSFRSYIKENLWKKTKNDEIGEKEFYDLLQKKNLEIYDMLLTKHKDTIYKKRPNSATIDILVKGKEKFKSLIIENQFEVILEILKLFSATRNVSDLQHIGGSKYSGVAKIGNKISSLDNCILIYQSITGIFEKRIDLLKV

SEQ ID NO: 20 - protein, 1334 aa, Listeria monocytogenes
MKNPYTIGLDIGTNSVGWAVLTNQYDLVKRKMKVAGNSDKKQIKKNFWGVRLFDDGQTAVDRRMNRTARRRIERRRNRISYLQEIFAVEMANIDANFFCRLNDSFYVDSEKRNSRHPFFATIEEEVAYHDNYRTIYHLREKLVNSSEKADLRLVYLALAHIIKYRGNFLIEGALDTKNTSVDEVYKQFIETYNQVFMSNIEEGALAKVEENIEVANILAGKFTRREKFERILQLYPGEKSTGMFAQFISLIVGSKGNFQKVFDLIEKTDIECAKDSYEEDLETLLAIIGDEYAELFVAAKNTYNAVVLSSIITVTDTETNAKLSASMIERFDAHEKDLVELKAFIKLNLPKQYEEIFSNAAIDGYAGYIDGKTKQVDFYKYLKTILENIEGSDYFIAKIEEENFLRKQRTFDNGAIPHQLHLEELEAIIHQQAKYYPFLKEDYDKIKSLVTFRIPYFVGPLANGQSEFAWLTRKADGEIRPWNIEEKVDFGKSAVDFIEKMTNKDTYLPKENVLPKHSLCYQKYMVYNELTKIRYIDDQGKTNYFSGREKQQVFNDLFKQKRKVKKKDLELFLRNINHIESPTIEGLEDSFNASYATYHDLLKVGMKQEILDNPLNTEMLEDIVKILTVFEDKPMIKEQLQQFSDVLDGGVLKKLERRHYTGWGRLSAKLLVGIREKQSHLTILDYLMNDDGLNRNLMQLINDSNLSFKSIIEKEQVSTTDKDLQSIVAELAGSPAIKKGILQSLKIVDELVSIMGYPPQTIVVEMARENQTTGKGKNNSKPRYKSLEKAIKEFGSQILKEHPTDNQELKNNRLYLYYLQNGKDMYTGQELDIHNLSNYDIDHIVPQSFITDNSIDNLVLTSSAGNREKGGDVPPLEIVRKRKVFWEKLYQGNLMSKRKFDYLTKAERGGLTEADKARFIHRQLVETRQITKNVANILYQRFNKETDNHGNTMEQVRIVTLKSALVSQFRKQFQLYKVREVNGYHHAHDAYLNGVVANTLLKVYPQLEPEFVYGEYHQFDWFKANKATAKKQFYTNIMLFFAQKERIIDENGEILWDKKYLETIKKVLDYRQMNIVKKTEIQKGEFSKATIKPKGNSSKLIPRKENWDPMKYGGLDSPNMAYAVIIEHAKGKKKIVIEKKLIQINIMERKMFEKDEEAFLEEKGYRHPKVLTKLPKYTLYECEKGRRRMLASANEAQKGNQLVLSNHLVSLLYHAKNCEASDGKSLKYIEAHRETFSELLAQVSEFATRYTLADANLSKINNLFEQNKEGDIKAIAQSFVDLMAFNAMGAPASFKFFEATIDRKRYTNLKELLSSTIIYQSITGLYESRKRLDD

SEQ ID NO: 21 - protein, 1236 aa, Mycoplasma mobile
MYFYKNKENKLNKKVVLGLDLGIASVGWCLTDISQKEDNKFPIILHGVRLFETVDDSDDKLLNETRRKKRGQRRRNRRLFTRKRDFIKYLIDNNIIELEFDKNPKILVRNFIEKYINPFSKNLELKYKSVTNLPIGFHNLRKAAINEKYKLDKSELIVLLYFYLSLRGAFFDNPEDTKSKEMNKNEIEIFDKNESIKNAEFPIDKIIEFYKISGKIRSTINLKFGHQDYLKEIKQVFEKQNIDFMNYEKFAMEEKSFFSRIRNYSEGPGNEKSFSKYGLYANENGNPELIINEKGQKIYTKIFKTLWESKIGKCSYDKKLYRAPKNSFSAKVFDITNKLTDWKHKNEYISERLKRKILLSRFLNKDSKSAVEKILKEENIKFENLSEIAYNKDDNKINLPIINAYHSLTTIFKKHLINFENYLISNENDLSKLMSFYKQQSEKLFVPNEKGSYEINQNNNVLHIFDAISNILNKFSTIQDRIRILEGYFEFSNLKKDVKSSEIYSEIAKLREFSGTSSLSFGAYYKFIPNLISEGSKNYSTISYEEKALQNQKNNFSHSNLFEKTWVEDLIASPTVKRSLRQTMNLLKEIFKYSEKNNLEIEKIVVEVTRSSNNKHERKKIEGINKYRKEKYEELKKVYDLPNENTTLLKKLWLLRQQQGYDAYSLRKIEANDVINKPWNYDIDHIVPRSISFDDSFSNLVIVNKLDNAKKSNDLSAKQFIEKIYGIEKLKEAKENWGNWYLRNANGKAFNDKGKFIKLYTIDNLDEFDNSDFINRNLSDTSYITNALVNHLTFSNSKYKYSVVSVNGKQTSNLRNQIAFVGIKNNKETEREWKRPEGFKSINSNDFLIREEGKNDVKDDVLIKDRSFNGHHAEDAYFITIISQYFRSFKRIERLNVNYRKETRELDDLEKNNIKFKEKASFDNFLLINALDELNEKLNQMRFSRMVITKKNTQLFNETLYSGKYDKGKNTIKKVEKLNLLDNRTDKIKKIEEFFDEDKLKENELTKLHIFNHDKNLYETLKIIWNEVKIEIKNKNLNEKNYFKYFVNKKLQEGKISFNEWVPILDNDFKIIRKIRYIKFSSEEKETDEIIFSQSNFLKIDQRQNFSFHNTLYWVQIWVYKNQKDQYCFISIDARNSKFEKDEIKINYEKLKTQKEKLQIINEEPILKINKGDLFENEEKELFYIVGRDEKPQKLEIKYILGKKIKDQKQIQKPVKKYFPNWKKVNLTYMGEIFKK

SEQ ID NO: 22 - protein, 1372 aa, Legionella pneumophila
MESSQILSPIGIDLGGKFTGVCLSHLEAFAELPNHANTKYSVILIDHNNFQLSQAQRRATRHRVRNKKRNQFVKRVALQLFQHILSRDLNAKEETALCHYLNNRGYTYVDTDLDEYIKDETTINLLKELLPSESEHNFIDWFLQKMQSSEFRKILVSKVEEKKDDKELKNAVKNIKNFITGFEKNSVEGHRHRKVYFENIKSDITKDNQLDSIKKKIPSVCLSNLLGHLSNLQWKNLHRYLAKNPKQFDEQTFGNEFLRMLKNFRHLKGSQESLAVRNLIQQLEQSQDYISILEKTPPEITIPPYEARTNTGMEKDQSLLLNPEKLNNLYPNWRNLIPGIIDAHPFLEKDLEHTKLRDRKRIISPSKQDEKRDSYILQRYLDLNKKIDKFKIKKQLSFLGQGKQLPANLIETQKEMETHFNSSLVSVLIQIASAYNKEREDAAQGIWFDNAFSLCELSNINPPRKQKILPLLVGAILSEDFINNKDKWAKFKIFWNTHKIGRTSLKSKCKEIEEARKNSGNAFKIDYEEALNHPEHSNNKALIKIIQTIPDIIQAIQSHLGHNDSQALIYHNPFSLSQLYTILETKRDGFHKNCVAVTCENYWRSQKTEIDPEISYASRLPADSVRPFDGVLARMMQRLAYEIAMAKWEQIKHIPDNSSLLIPIYLEQNRFEFEESFKKIKGSSSDKTLEQAIEKQNIQWEEKFQRIINASMNICPYKGASIGGQGEIDHIYPRSLSKKHFGVIFNSEVNLIYCSSQGNREKKEEHYLLEHLSPLYLKHQFGTDNVSDIKNFISQNVANIKKYISFHLLTPEQQKAARHALFLDYDDEAFKTITKFLMSQQKARVNGTQKFLGKQIMEFLSTLADSKQLQLEFSIKQITAEEVHDHRELLSKQEPKLVKSRQQSFPSHAIDATLTMSIGLKEFPQFSQELDNSWFINHLMPDEVHLNPVRSKEKYNKPNISSTPLFKDSLYAERFIPVWVKGETFAIGFSEKDLFEIKPSNKEKLFTLLKTYSTKNPGESLQELQAKSKAKWLYFPINKTLALEFLHHYFHKEIVTPDDTTVCHFINSLRYYTKKESITVKILKEPMPVLSVKFESSKKNVLGSFKHTIALPATKDWERLFNHPNFLALKANPAPNPKEFNEFIRKYFLSDNNPNSDIPNNGHNIKPQKHKAVRKVFSLPVIPGNAGTMMRIRRKDNKGQPLYQLQTIDDTPSMGIQINEDRLVKQEVLMDAYKTRNLSTIDGINNSEGQAYATFDNWLTLPVSTFKPEIIKLEMKPHSKTRRYIRITQSLADFIKTIDEALMIKPSDSIDDPLNMPNEIVCKNKLFGNELKPRDGKMKIVSTGKIVTYEFESDSTPQWIQTLYVTQLKKQP

SEQ ID NO: 23 - protein, 1122 aa, Streptococcus thermophilus
MSDLVLGLDIGIGSVGVGILNKVTGEIIHKNSRIFPAAQAENNLVRRTNRQGRRLTRRKKHRIVRLNRLFEESGLITDFTKISINLNPYQLRVKGLTDELSNEELFIALKNMVKHRGISYLDDASDDGNSSVGDYAQIVKENSKQLETKTPGQIQLERYQTYGQLRGDFTVEKDGKKHRLINVFPTSAYRSEALRILQTQQEFNSQITDEFINRYLEILTGKRKYYHGPGNEKSRTDYGRYRTNGETLDNIFGILIGKCTFYPDEFRAAKASYTAQEFNLLNDLNNLTVPTETKKLSKEQKNQIINYVKNEKVMGPAKLFKYIAKLLSCDVADIKGHRIDKSGKAEIHTFEAYRKMKTLETLDIEQMDRETLDKLAYVLTLNTEREGIQEALEHEFADGSFSQKQVDELVQFRKANSSIFGKGWHNFSVKLMMELIPELYETSEEQMTILTRLGKQKTTSSSNKTKYIDEKLLTEEIYNPVVAKSVRQAIKIVNAAIKEYGDFDNIVIEMARETNEDDEKKAIQKIQKANKDEKDAAMLKAANQYNGKAELPHSVFHGHKQLATKIRLWHQQGERCLYTGKTISIHDLINNPNQFEVDHILPLSITFDDSLANKVLVYATANQEKGQRTPYQALDSMDDAWSFRELKAFVRESKTLSNKKKEYLLTEEDISKFDVRKKFIERNLVDTRYASRVVLNALQEHFRAHKIDTKVSVVRGQFTSQLRRHWGIEKTRDTYHHHAVDALIIAASSQLNLWKKQKNTLVSYSEEQLLDIETGELISDDEYKESVFKAPYQHFVDTLKSKEFEDSILFSYQVDSKFNRKISDATIYATRQAKVGKDKKDETYVLGKIKDIYTQDGYDAFMKIYKKDKSKFLMYRHDPQTFEKVIEPILENYPNKEMNEKGKEVPCNPFLKYKEEHGYIRKYSKKGNGPEIKSLKYYDSKLLGNPIDITPENSKNKVVLQSLKPWRTDVYFNKNTGKYEILGLKYADLQFEKKTGTYKISQEKYNGIMKEEGVDSDSEFKFTLYKNDLLLVKDTETKEQQLFRFLSRTMPNVKYYVELKPYSKDKFEKNESLIEILGSADKSGRCIKGLGKSNISIYKVRTDVLGNQHIIKNEGDKPKLDF

SEQ ID NO: 24 - protein, 1128 aa, Streptococcus thermophilus
MSDLVLGLDIGIGSVGVGILNKVTGEIIHKNSRIFPAAQAENNLVRRTNRQGRRLTRRKKHRIVRLNRLFEESGLITDFTKISINLNPYQLRVKGLTDELSNEELFIALKNMVKHRGISYLDDASDDGNSSVGDYAQIVKENSKQLETKTPGQIQLERYQTYGQLRGDFTVEKDGKKHRLINVFPTSAYRSEALRILQTQQEFNPQITDEFINRYLEILTGKRKYYHGPGNEKSRTDYGRYRTSGETLDNIFGILIGKCTFYPEEFRAAKASYTAQEFNLLNDLNNLTVPTETKKLSKEQKNQIINYVKNEKAMGPAKLFKYIAKLLSCDVADIKGYRIDKSGKAEIHTFEAYRKMKTLETLDIEQMDRETLDKLAYVLTLNTEREGIQEALEHEFADGSFSQKQVDELVQFRKANSSIFGKGWHNFSVKLMMELIPELYETSEEQMTILTRLGKQKRLRLQIKQNISNKTKYIDEKLLTEEIYNPVVAKSVRQAIKIVNAAIKEYGDFDNIVIEMARETNEDDEKKAIQKIQKANKDEKDAAMLKAANQYNGKAELPHSVFHGHKQLATKIRLWHQQGERCLYTGKTISIHDLINNPNQFEVDHILPLSITFDDSLANKVLVYATANQEKGQRTPYQALDSMDDAWSFRELKAFVRESKTLSNKKKEYLLTEEDISKFDVRKKFIERNLVDTRYASRVVLNALQEHFRAHKIDTKVSVVRGQFTSQLRRHWGIEKTRDTYHHHAVDALIIAASSQLNLWKKQKNTLVSYSEEQLLDIETGELISDDEYKESVFKAPYQHFVDTLKSKEFEDSILFSYQVDSKFNRKISDATIYATRQAKVGKDKKDETYVLGKIKDIYTQDGYDAFMKIYKKDKSKFLMYRHDPQTFEKVIEPILENYPNKQMNEKGKEVPCNPFLKYKEEHGYIRKYSKKGNGPEIKSLKYYDSKLLGNPIDITPENSKNKVVLQSLKPWRTDVYFNKATGKYEILGLKYADLQFEKGTGTYKISQEKYNDIKKKEGVDSDSEFKFTLYKNDLLLVKDTETKEQQLFRFLSRTLPKQKHYVELKPYDKQKFEGGEALIKVLGNVANGGQCIKGLAKSNISIYKVRTDVLGNQHIIKNEGDKPKLDF

SEQ ID NO: 25 - protein, 1123 aa, Francisella tularensis
MNVKILPIAIDLDVKNTGVFSAFYQKGTSLEKLDNKNGKVYELSKDSYTLLMNNRTARRHKRRGIDRKQLVKRLFKLVWTEQLNLEWDKDTQQAISFLFNRRGFSFITDGYSTEYLNIVPEQVKAILMDIFDDYNGEDDLDSYLKLATEQESKISEIYNKLMQKILEFKLRKLCTDIKDDKVSTKTLKEITSYEFELLADYLANYSESLKTQKFSYTDKQGNLKELSYYHHDKYNIQEFLKRHATINDEILGTLLTDDFDIWNFNFEKFDFDKNEEKLQNQEDKDHTQAHLHHFVFVVNKIKSEMASGGRHRSQYFQEITNVLDENNHQEGYLKNFCENLHNKKYSNLSVKNLVNLVGNLSNLELKPLRKYFNDKIHAKADHWDEQKFTETYCHWILGEWRVGVKDQDKKDGAKYSYKDLCNELKQKVTKAGLIDFLLELDPCRTIPPYLDNNNRKPPKCQSLILNPKFLDNQYPNWQQYLQELKKLQSIQDYLDSFETDLKDLKSSKDQPYFVEYKSSNQQMASGQRDYKDLDARILQFIFDRVKASDELLLNEIYFQAKKLKQKASSELEKLESSKKLDEVIANSQLSQILKSQHTNGIFEQGTFLHLVCKYYKQRQRARDSRLYIMPEYRYDKKLDKYNNTGRFDDNNQLLTYCNHKPRQKRYQLLNDLAGVLQVSRNQLLSSVEEWFQQAQRVGEISKSQDEQIFEWLKSFKIASYCKAAVEMQKQYRGTLKNAIQTAIFRQSENINKNKNTGNQQQALSENSKDVKSLTADEKKLLKLIENIAKASQKIGESLGLNDKQIKKFNSIYSFAQIQQIAFAKRKGNANTCAVCSADNAHRMQQIKITELVEDNKDNIILSAKAQRLPAIPTRIVDGAVKKMATILAKNIVDDNWQNIKQVLSAKHQLHIPIITESNAFEFEPALADVKGKSLKDRRKKALERISPENIFKDKNNRIKEFAKGISAYSGANLTDGDFDGAKEELDHIIPRSHKKYGTLNDEANLICVTRDDNKNIFAIDTSKWFEIETPSDLRDIGVATIQYKIDNNSRPKVRVKLDYVIDDDSKINYFMNHSLLKSRYPDKVLEILKQSTIIEFESSGFNKTIKEMLGMTLAGIYNETSNN

SEQ ID NO: 26 - protein, 1436 aa, Bacteroides fragilis
MKRILGLDLGTNSIGWALVNEAENKDERSSIVKLGVRVNPLTVDELTNFEKGKSITTNADRTLKRGMRRNLQRYKLRRETLTEVLKEHKLITEDTILSENGNRTTFETYRLRAKAVTEEISLEEFARVLLMINKKRGYKSSRKAKGVEEGTLIDGMDIARELYNNNLTPGELCLQLLDAGKKFLPDFYRSDLQNELDRIWEKQKEYYPEILTDVLKEELRGKKRDAVWAICAKYFVWKENYTEWNKEKGKTEQQEREHKLEGIYSKRKRDEAKRENLQWRVNGLKEKLSLEQLVIVFQEMNTQINNSSGYLGAISDRSKELYFNKQTVGQYQMEMLDKNPNASLRNMVFYRQDYLDEFNMLWEKQAVYHKELTEELKKEIRDIIIFYQRRLKSQKGLIGFCEFESRQIEVDIDGKKKIKTVGNRVISRSSPLFQEFKIWQILNNIEVTVVGKKRKRRKLKENYSALFEELNDAEQLELNGSRRLCQEEKELLAQELFIRDKMTKSEVLKLLFDNPQELDLNFKTIDGNKTGYALFQAYSKMIEMSGHEPVDFKKPVEKVVEYIKAVFDLLNWNTDILGFNSNEELDNQPYYKLWHLLYSFEGDNTPTGNGRLIQKMTELYGFEKEYATILANVSFQDDYGSLSAKAIHKILPHLKEGNRYDVACVYAGYRHSESSLTREEIANKVLKDRLMLLPKNSLHNPVVEKILNQMVNVINVIIDIYGKPDEIRVELARELKKNAKEREELTKSIAQTTKAHEEYKTLLQTEFGLTNVSRTDILRYKLYKELESCGYKTLYSNTYISREKLFSKEFDIEHIIPQARLFDDSFSNKTLEARSVNIEKGNKTAYDFVKEKFGESGADNSLEHYLNNIEDLFKSGKISKTKYNKLKMAEQDIPDGFIERDLRNTQYIAKKALSMLNEISHRVVATSGSVTDKLREDWQLIDVMKELNWEKYKALGLVEYFEDRDGRQIGRIKDWTKRNDHRHHAMDALTVAFTKDVFIQYFNNKNASLDPNANEHAIKNKYFQNGRAIAPMPLREFRAEAKKHLENTLISIKAKNKVITGNINKTRKKGGVNKNMQQTPRGQLHLETIYGSGKQYLTKEEKVNASFDMRKIGTVSKSAYRDALLKRLYENDNDPKKAFAGKNSLDKQPIWLDKEQMRKVPEKVKIVTLEAIYTIRKEISPDLKVDKVIDVGVRKILIDRLNEYGNDAKKAFSNLDKNPIWLNKEKGISIKRVTISGISNAQSLHVKKDKDGKPILDENGRNIPVDFVNTGNNHHVAVYYRPVIDKRGQLVVDEAGNPKYELEEVVVSFFEAVTRANLGLPIIDKDYKTTEGWQFLFSMKQNEYFVFPNEKTGFNPKEIDLLDVENYGLISPNLFRVQKFSLKNYVFRHHLETTIKDTSSILRGITWIDFRSSKGLDTIVKVRVNHIGQIVSVGEY

SEQ ID NO: 27 - protein, 1314 aa, Mycoplasma synoviae
MLRLYCANNLVLNNVQNLWKYLLLLIFDKKIIFLFKIKVILIRRYMENNNKEKIVIGFDLGVASVGWSIVNAETKEVIDLGVRLFSEPEKADYRRAKRTTRRLLRRKKFKREKFHKLILKNAEIFGLQSRNEILNVYKDQSSKYRNILKLKINALKEEIKPSELVWILRDYLQNRGYFYKNEKLTDEFVSNSFPSKKLHEHYEKYGFFRGSVKLDNKLDNKKDKAKEKDEEEESDAKKESEELIFSNKQWINEIVKVFENQSYLTESFKEEYLKLFNYVRPFNKGPGSKNSRTAYGVFSTDIDPETNKFKDYSNIWDKTIGKCSLFEEEIRAPKNLPSALIFNLQNEICTIKNEFTEFKNWWLNAEQKSEILKFVFTELFNWKDKKYSDKKFNKNLQDKIKKYLLNFALENFNLNEEILKNRDLENDTVLGLKGVKYYEKSNATADAALEFSSLKPLYVFIKFLKEKKLDLNYLLGLENTEILYFLDSIYLAISYSSDLKERNEWFKKLLKELYPKIKNNNLEIIENVEDIFEITDQEKFESFSKTHSLSREAFNHIIPLLLSNNEGKNYESLKHSNEELKKRTEKAELKAQQNQKYLKDNFLKEALVPLSVKTSVLQAIKIFNQIIKNFGKKYEISQVVIEMARELTKPNLEKLLNNATNSNIKILKEKLDQTEKFDDFTKKKFIDKIENSVVFRNKLFLWFEQDRKDPYTQLDIKINEIEDETEIDHVIPYSKSADDSWFNKLLVKKSTNQLKKNKTVWEYYQNESDPEAKWNKFVAWAKRIYLVQKSDKESKDNSEKNSIFKNKKPNLKFKNITKKLFDPYKDLGFLARNLNDTRYATKVFRDQLNNYSKHHSKDDENKLFKVVCMNGSITSFLRKSMWRKNEEQVYRFNFWKKDRDQFFHHAVDASIIAIFSLLTKTLYNKLRVYESYDVQRREDGVYLINKETGEVKKADKDYWKDQHNFLKIRENAIEIKNVLNNVDFQNQVRYSRKANTKLNTQLFNETLYGVKEFENNFYKLEKVNLFSRKDLRKFILEDLNEESEKNKKNENGSRKRILTEKYIVDEILQILENEEFKDSKSDINALNKYMDSLPSKFSEFFSQDFINKCKKENSLILTFDAIKHNDPKKVIKIKNLKFFREDATLKNKQAVHKDSKNQIKSFYESYKCVGFIWLKNKNDLEESIFVPINSRVIHFGDKDKDIFDFDSYNKEKLLNEINLKRPENKKFNSINEIEFVKFVKPGALLLNFENQQIYYISTLESSSLRAKIKLLNKMDKGKAVSMKKITNPDEYKIIEHVNPLGINLNWTKKLENNN

SEQ ID NO: 28 - protein, 1368 aa, Streptococcus pyogenes
MDKKYSIGLDIGTNSVGWAVITDDYKVPSKKFKVLGNTDRHSIKKNLIGALLFDSGETAEATRLKRTARRRYTRRKNRICYLQEIFSNEMAKVDDSFFHRLEESFLVEEDKKHERHPIFGNIVDEVAYHEKYPTIYHLRKKLVDSTDKADLRLIYLALAHMIKFRGHFLIEGDLNPDNSDVDKLFIQLVQTYNQLFEENPINASGVDAKAILSARLSKSRRLENLIAQLPGEKKNGLFGNLIALSLGLTPNFKSNFDLAEDAKLQLSKDTYDDDLDNLLAQIGDQYADLFLAAKNLSDAILLSDILRLNSEITKAPLSASMIKRYDEHHQDLTLLKALVRQQLPEKYKEIFFDQSKNGYAGYIDGGASQEEFYKFIKPILEKMDGTEELLAKLNREDLLRKQRTFDNGSIPHQIHLGELHAILRRQEDFYPFLKDNREKIEKILTFRIPYYVGPLARGNSRFAWMTRKSEETITPWNFEEVVDKGASAQSFIERMTNFDKNLPNEKVLPKHSLLYEYFTVYNELTKVKYVTEGMRKPAFLSGEQKKAIVDLLFKTNRKVTVKQLKEDYFKKIECFDSVEISGVEDRFNASLGTYHDLLKIIKDKDFLDNEENEDILEDIVLTLTLFEDREMIEERLKTYAHLFDDKVMKQLKRRRYTGWGRLSRKLINGIRDKQSGKTILDFLKSDGFANRNFMQLIHDDSLTFKEDIQKAQVSGQGDSLHEHIANLAGSPAIKKGILQTVKVVDELVKVMGRHKPENIVIEMARENQTTQKGQKNSRERMKRIEEGIKELGSQILKEHPVENTQLQNEKLYLYYLQNGRDMYVDQELDINRLSDYDVDHIVPQSFIKDDSIDNKVLTRSDKNRGKSNNVPSEEVVKKMKNYWRQLLNAKLITQRKFDNLTKAERGGLSELDKAGFIKRQLVETRQITKHVAQILDSRMNTKYDENDKLIREVKVITLKSKLVSDFRKDFQFYKVREINNYHHAHDAYLNAVVGTALIKKYPKLESEFVYGDYKVYDVRKMIAKSEQEIGKATAKYFFYSNIMNFFKTEITLANGEIRKRPLIETNGETGEIVWDKGRDFATVRKVLSMPQVNIVKKTEVQTGGFSKESILPKRNSDKLIARKKDWDPKKYGGFDSPTVAYSVLVVAKVEKGKSKKLKSVKELLGITIMERSSFEKNPIDFLEAKGYKEVRKDLIVKLPKYSLFELENGRKRMLASAGELQKGNELALPSKYVNFLYLASHYEKLKGSPEDNEQKQLFVEQHKHYLDEIIEQISEFSKRVILADANLDKVLSAYNKHRDKPIREQAENIIHLFTLTNLGAPAAFKYFDTTIDRKRYTSTKEVLDATFIHQSITGLYETRIDLSQLGGD

SEQ ID NO: 29 - protein, 1368 aa, Streptococcus pyogenes
MDKKYSIGLDIGTNSVGWAVITDDYKVPSKKFKVLGNTDRHSIKKNLIGALLFDSGETAEATRLKRTARRRYTRRKNRICYLQEIFSNEMAKVDDSFFHRLEESFLVEEDKKHERHPIFGNIVDEVAYHEKYPTIYHLRKKLVDSTDKADLRLIYLALAHMIKFRGHFLIEGDLNPDNSDVDKLFIQLVQTYNQLFEENPINASGVDAKAILSARLSKSRRLENLIAQLPGEKKNGLFGNLIALSLGLTPNFKSNFDLAEDAKLQLSKDTYDDDLDNLLAQIGDQYADLFLAAKNLSDAILLSDILRVNTEITKAPLSASMIKRYDEHHQDLTLLKALVRQQLPEKYKEIFFDQSKNGYAGYIDGGASQEEFYKFIKPILEKMDGTEELLVKLNREDLLRKQRTFDNGSIPHQIHLGELHAILRRQEDFYPFLKDNREKIEKILTFRIPYYVGPLARGNSRFAWMTRKSEETITPWNFEEVVDKGASAQSFIERMTNFDKNLPNEKVLPKHSLLYEYFTVYNELTKVKYVTEGMRKPAFLSGEQKKAIVDLLFKTNRKVTVKQLKEDYFKKIECFDSVEISGVEDRFNASLGTYHDLLKIIKDKDFLDNEENEDILEDIVLTLTLFEDREMIEERLKTYAHLFDDKVMKQLKRRRYTGWGRLSRKLINGIRDKQSGKTILDFLKSDGFANRNFMQLIHDDSLTFKEDIQKAQVSGQGDSLHEHIANLAGSPAIKKGILQTVKVVDELVKVMGRHKPENIVIEMARENQTTQKGQKNSRERMKRIEEGIKELGSQILKEHPVENTQLQNEKLYLYYLQNGRDMYVDQELDINRLSDYDVDHIVPQSFLKDDSIDNKVLTRSDKNRGKSDNVPSEEVVKKMKNYWRQLLNAKLITQRKFDNLTKAERGGLSELDKAGFIKRQLVETRQITKHVAQILDSRMNTKYDENDKLIREVKVITLKSKLVSDFRKDFQFYKVREINNYHHAHDAYLNAVVGTALIKKYPKLESEFVYGDYKVYDVRKMIAKSEQEIGKATAKYFFYSNIMNFFKTEITLANGEIRKRPLIETNGETGEIVWDKGRDFATVRKVLSMPQVNIVKKTEVQTGGFSKESILPKRNSDKLIARKKDWDPKKYGGFDSPTVAYSVLVVAKVEKGKSKKLKSVKELLGITIMERSSFEKNPIDFLEAKGYKEVKKDLIIKLPKYSLFELENGRKRMLASAGELQKGNELALPSKYVNFLYLASHYEKLKGSPEDNEQKQLFVEQHKHYLDEIIEQISEFSKRVILADANLDKVLSAYNKHRDKPIREQAENIIHLFTLTNLGAPAAFKYFDTTIDRKRYTSTKEVLDATLIHQSITGLYETRIDLSQLGGD

SEQ ID NO: 30 - protein, 1370 aa, Streptococcus agalactiae; identical to SEQ ID NO: 11

SEQ ID NO: 31 - protein, 1173 aa, Rhodospirillum rubrum
MRPIEPWILGLDIGTDSLGWAVFSCEEKGPPTAKELLGGGVRLFDSGRDAKDHTSRQAERGAFRRARRQTRTWPWRRDRLIALFQAAGLTPPAAETRQIALALRREAVSRPLAPDALWAALLHLAHHRGFRSNRIDKRERAAAKALAKAKPAKATAKATAPAKEADDEAGFWEGAEAALRQRMAASGAPTVGALLADDLDRGQPVRMRYNQSDRDGVVAPTRALIAEELAEIVARQSSAYPGLDWPAVTRLVLDQRPLRSKGAGPCAFLPGEDRALRALPTVQDFIIRQTLANLRLPSTSADEPRPLTDEEHAKALALLSTARFVEWPALRRALGLKRGVKFTAETERNGAKQAARGTAGNLTEAILAPLIPGWSGWDLDRKDRVFSDLWAARQDRSALLALIGDPRGPTRVTEDETAEAVADAIQIVLPTGRASLSAKAARAIAQAMAPGIGYDEAVTLALGLHHSHRPRQERLARLPYYAAALPDVGLDGDPVGPPPAEDDGAAAEAYYGRIGNISVHIALNETRKIVNALLHRHGPILRLVMVETTRELKAGADERKRMIAEQAERERENAEIDVELRKSDRWMANARERRQRVRLARRQNNLCPYTSTPIGHADLLGDAYDIDHVIPLARGGRDSLDNMVLCQSDANKTKGDKTPWEAFHDKPGWIAQRDDFLARLDPQTAKALAWRFADDAGERVARKSAEDEDQGFLPRQLTDTGYIARVALRYLSLVTNEPNAVVATNGRLTGLLRLAWDITPGPAPRDLLPTPRDALRDDTAARRFLDGLTPPPLAKAVEGAVQARLAALGRSRVADAGLADALGLTLASLGGGGKNRADHRHHFIDAAMIAVTTRGLINQINQASGAGRILDLRKWPRTNFEPPYPTFRAEVMKQWDHIHPSIRPAHRDGGSLHAATVFGVRNRPDARVLVQRKPVEKLFLDANAKPLPADKIAEIIDGFASPRMAKRFKALLARYQAAHPEVPPALAALAVARDPAFGPRGMTANTVIAGRSDGDGEDAGLITPFRANPKAAVRTMGNAVYEVWEIQVKGRPRWTHRVLTRFDRTQPAPPPPPENARLVMRLRRGDLVYWPLESGDRLFLVKKMAVDGRLALWPARLATGKATALYAQLSCPNINLNGDQGYCVQSAEGIRKEKIRTTSCTALGRLRLSKKAT

SEQ ID NO: 32 - protein, 997 aa, Maritimibacter alkaliphilus
MKVLVDAGLMPSDPAAAKALETLDPYELRATGLDVMLPLTHLGRAVFHLNQRRGFKSNRKTDRGDNESGKIKDATKRLTWAMQEAGARTYGEFLHMRRARASDPRQVPSVRTRLSVASRGGPDSKEEAGYDFYPERAHLEDEFHALWSAQAAFHPDLTCELRDVVFEKIFYQRPLKEPKVGLCLFTAEERLPKAHPLTGRRVLYETVNQLRVTADGRTTRPLTLEERDMIVYALDNKKPVKSLSSMHLKLVALGKLVKLKDGERFTLESGVRDAIACDPIRATMGHPDGFGPAWSRLDWQAQWALIEKLRQVQSDDDFASLVAWLGATHNLSEDHAKRVANLHLPEGYGRLGLTATEAILCNLKAEVCTYSQAVERWGKHHSNQRTGECLEALPYYGEVLDRHVIPGTYNEDDDDVTRYGRITNPTVHIGLNQLRRLVNRIIATYGKPDQIVVELARELKQSEAQKSEALKKIRDTTADAIRRGRQLEEIGQKNTGANRLLLRLWEDLGPAVGPRCCPYTGKPISVTMLFDGACDVDHILPYSRTLDDSFANRTICLREANRQKGDRTPWEAWGGSDQWDAIEANLKDLPENKRKRFAPDAMERFEGERDFLDRALVDTQYLARISRAYLDTLFTEGGHVWVVPGRMTEMLRRHWGLNALLSDKDRGAGKVKNRTDHRHHAIDAAVIAATDHSLVNRISKAAGQGESAGQSAELIARDTPEPWEGFRNDISAQIARIVVSHRADHGRIDVEGRKHGKDSTAGRLHNDTAYGIVDDHTVVSRTPLLSLKPGDIEVTTKGKNIRDTQLQKALSVATTGKDGKGFEEALRNFAEKEGPYQGIRRVRLIETLQSSARVEVGSDEDGQPLKAYKGDSNHCYDLWKLPDGKVVPHVVSTYEAHAGTDKRPHPAAKRILRVFKKDMVAIEQDDQTAIFYVQKLDRANGLFLAPHLEANADARHRNPNDAFKFLQMGAGSVVRNKLRRVYVDEIGRIKDPGPPKH

SEQ ID NO: 33 - protein, 1027 aa, Blastopirellula marina
MFSESGDQPSLVDCGVRIFPEGVERDQQGGEKSKSQSRRVARGIRRQVRRRAQRLRHLKHALITTGLFPADVVDQQEVLASNPYELRSRALSEKLEPYEIGRILLHLAKRRGFLSNRTTDRSGGNELKGILAEMTQLQGEIAAHGCQTLGQYLHQLGDDGETFAQRLRGRHTLRAMYEDEFEKIWERQASYYPALLTEELRGGEEGKQSYPLVPTARRKSESLLKRFGLHGLLFFQRKMYWPKSVIGRCDLEPKEKRCPKADRLAQRFRILQEVNNLRLISPADRKEYTFAEFVGAGADKKLVDYLCEAKERTFPQIRKKFKLPETISFNYERGERSKLQGHETDAHFNGKKGLGKRRWSEIAEDVKDHIIQIVLEEDREDVALRKLTQDCSLTVEEAHKAMALHLPAGYSQYSRVAISRLLPHLELGKLLMGNDASDSAMHAAGYLRPDEREVRQYDLLPEPPDIPNPLVRQALYEVRKVINAIIREYGALGTIRVELAREAKKSAEQRTQIRIANAKRERENAAIAKTLQEMSPAIRPTRRNIQRYLLWKDQGGVCIYTGKVISQAQLFDSGEVDVDHILPRWRSLDDSMANKVIAHRSANNEKGDRTPWEWLGHDKPRFDELLLRAQRLPYGKRQRFIQKEVELTNFVERQLRDTTYVSRLVVQYLKGLGVPITTVKGPMTAELRHHWGLNALLNEDGSQKKNRSDHRHHAIDAIVIGLTDAKRLHALANARGKDLQPPWSEFRSDVATALGRMAVSHRVRRRIQGALHEETIYGPTQKAAQPTSTDQRPWAKDWIEDSQIVVRRKSVSDLTNTKHLAKIRDVTIRKILEDHLRRQKVDPTKPGVIPKDAFAGSNAPQMPSGVPIKKVRLVERGETWRKIGSGEASKFIKPGSNHHISYFAISRKGRESWKAHVTIMLDAACIAKESINNGKIVNRSIGDQGRFLMSLSIGEMFEITNNGGEILLCVVRKIDQSGRIYYKIHDDARESMDLKKDNLYMSPSKMQQFDARKVTVTPLGKIRNAND

SEQ ID NO: 34 - protein, 158 aa, Francisella tularensis
MIDFLLELDPCITIPPYLDNNNRKPPKCQSLILNPKFLDNQYPNWQQYLQELKKLQSIQDYLDSFETDLKDLKSSKDQPYFVEYKSSNQQMASGQRDYKDLDARILQFIFDRVKASDELLLSEIYFQAKKLKQKASSELEKLESSKKLDEVIANSQLS

SEQ ID NO: 35 - protein, 393 aa, Francisella tularensis
MNVKILPIAIDLDVKNTGVFSAFYQKGTSLEKLDNKNGKVYELSKDSYTLLMNNRTAQRHQRRGIDRKQLVKRLFKLVWTEQLNLEWDKDTQQAISFLFNRRGFSFITDGYSTEYLNIVPEQVKAILMDIFDDYNGEDDLDSYLKLATEQESKISEIYNKLMQKILEFKLRKLCTDIKDDKVSTKTLKEITSYEFELLADYLANYSESLKTQKFSYTDKQGNLKELSYYHHDKYNIQEFLKRHATINDEILDTLLTDDFDIWNFNFEKFDFDKNEEKLQSQEDKDHTQAYFHHFVFAVNKIKSEMASGGRHRSQYFQEITNVLDENNHQEGYLKNFCENLHNKKYSNLSVKNLVNLVGNLSNLELKPLRKYFNDKNLIIGMSKSLQKLIATGY

SEQ ID NO: 36 - protein, 1066 aa, Rhodopseudomonas palustris
MSERVVRRILGIDLGIASCGWGVVDISGAGGGIIATGVRCFDAPLIDKTGEPKSATRRTARGQRRIVRRRRQRMNGVRRLLCEFGLLPDPRPDALNQAMRRISTASAAAQVTPWTLRAAAHQRLLSNEELAVVLGHIARHRGFRSNAKNEAGANAADETSKMKKAMEATREGLAKYHAFGDMIANDPKFANRKRNRDKDYSHTAKRSDLEDEVRAILRAQLRFGSAAATETLAQTFADVAFFQRPLQDSEDRVGDCPFEPGQKRAARRAPSFELFRFLSRLANLKLAVGRSPERRLTAEEIALAAKGFGETKKTITFKSLREALDLDPNARFSGIGKDKEASLDVVARTGGAAYGTKTLKDALGDAPWRSLSRTPETLDRIAEILSFREDITSIRNGLEDLGLDSLVVEALMQAAANGDFKEFTRAGHISARAARNIIPGLREGLVYSEACARVGYDHAARLSVPLDQVGSPVTRKALSEALKQVRAVAREYGPIDYFHIELARSVGKSAEERKQLTDGIEARNVEKAKRRKQAEEHLGRAPSDDELLRYELAKEQNFKCIYSGDAIDPAGVAANDTRYQVDHILPWSRFGDDSYLNKTLCTARSNQNKRGRTPFEWFEADKTDVEWMEYVARVENLQEVKGRKKRNYSIKDAAAIEDKFKARNLTDTQWATRLLADELSRMFPPRECERAICGRADGGNDGLTIVEERRVFTRPGAITSKLRRAWGLEGLKKQDGKRVEDDRHHAVDALVLAATTESLLQRLTVEVQRREREGRPDDIFHCAEPWRGFRADVRRTVYGSETMPGIFVSRAERRRARGKAHDATIKQIREIEGERLVFERKPVEKLTDKDLEKIPIPKPYGQVSDPKRLRDELVESLRAWIAAGKPKDRPPLSPKGDVIRKVRIQTNDKVSVEINGGTVDRGDMARVDVFRKKNKKAVWEYYVVPIYPHQIVALNDPPDRAVIAYAEDKDWKEIDSSYEFLWSLFGLSYVEISKANGECIDGYFRGLHRGTGAASVCKHISLGKDATVSGIGLKTLASFKKFTIDRLGRKFEIPREVRTWRGEACT

SEQ ID NO: 37 - protein, 1149 aa, Lactobacillus salivarius
MERYHIGLDIGTSSIGWAVIGDDFKIKRKKGKNLIGVRLFKEGDTAAERRGFRTQRRRLNRRKWRLKLLEEIFDPYMAEVDKYFFARLKESNLSPKDSNKKYLGSLLFPDISDSNFYDKYPTIYHLRRDLMEKDKKFDLREIYLAIHHIVKYRGNFLEKVPAKNYKNSGASIGFLLEEVNDLYGNIIGNEDVAILDNDKFEDVEKIILNDEIRNIDKQKNVGRLLVKDKKEKNIVTAFSKAIFGYKFNLEDLLLIESDEKNKLTFNDENIDDIFNELSHSLNDNQMDLLTKTREIYFKFKLNMIVPTGYTISESMIEKYEMHKAHLKMYKEFINTLNAKDRKILKNAYSDYINNEKAKAANAQENFYKTVKKTIKENDSDTAKKIIGLIDEGNFMPKQRTGENGVIPHQLHQIELDRIIENQAKYYPWLAEENPVEKNRKFAKYKLDELVTFRVPYYVGPLIDKTESNKNEKETKFAWMVRKAKGTITPWNFENLVDRTESANRFIKRMTSKDTYIIGEDVLPASSLLYEKYKVLNELNNIKVNKKKLDVEQKQHVYLDLFTTRKNVTKDDLATSLNCDVESITGLTDNKKFNSSLSSYIDLKAILGNIVDDYSKNEDLEKIIEYSTIFEDGNIYKEKLSEISWLTDEQIEKLSNIHFKGWGRLSKKLLTQITNENGERIIDTLWNTSNNFIQVISDESIQAKLAEINGEYANKYNLEDILDEAYTSPQNKKAIRQVMKVVEDIEKAMKCEPTSIAIEFTREKRKSKLTNTRYKKISETYEKITDELISEYELGKLQSELDSKVNNMRDRYYLYFMQLGRDMYTGEKMNIDELHQKYDIDHILPQSFIKDDSLNNRVLTSKSVNIKEKSDKTAADLYAAKMGDFWRKLRKQGLMTEQKYKNLLTRTDSINKYTKQSFIKRQLVETSQVVKLAANILQDKYRNTKIIEIRARLNSDLRKKYELIKNREVNDYHHAIDGYLTTFVGQYLYKVYPKLRSYFVYDDFKKLDSNYLKHMDKFNFIWKLEDKKAEDVYDKVNDEFVLNVPEMKEYIRKIYNYKYMLVSKEVTTKNGAFYDQTKYNAKTINLIPIKKDKPTNIYGGYKGKVSSYMMLVKIQKKKEVIYKFVGVPRLWTDELDRLIDTDEKKALLKK

SEQ ID NO: 38 - protein, 1064 aa, Rhodopseudomonas palustris
MSECVTRRILGIDLGIASCGWGVIEVGEASGSIIASGVRCFDAPLIDKTGEPKSATRRTARGQRRIIRRRRQRMNAVRRLLAEFGVLTGRSPDALHQALLRLSQSVAGSQVTPWTLRAAAHERKLTNDELAVVLGHIARHRGFRSNSKNDGGANAADETSKMKKAMETTREGLARYHSFGAMIASDPKFADRKRNRDKDYSHTAKRSDLEDEVRTIFRSQTRFGSLVASEKLSQAFADAAFFQRPLQDSEDMVGSCPFEPGQKRTARRAPSFELFRFLSRLANLKLTVGRAPERRLTPDEIALAAKGFGETKKSITFKSLREALDLDPNARFSGVAKEKESTLDVAARTGGAAYGTKTLKDALGDAPWRSLSRMPEKLDRIAEILSFREDMKAIRNGLEEVGLDGLVVDALMQATANGDFKDFTRAAHISALAARNIIPGLREGLVYSDACTRVGYDHAARPAVPLSQIGSPVTRKALSEALKQVRAVAREYGPIDYFHIELARSIGKSAEERKKLTDGIEARNVEKEKRRKEAAEHLGRAPSDDELLRYELAKEQNFKCIYSGDPIDPAGISANDTRYQVDHILPWSRFGDDSYVNKTLCTARSNQNKRGRTPFEWFDADKTEAEWMEYSARVEDLKEVKGRKKRNYSIKDAASVEDKFKARNLTDTQWATRLLADELKRMFPPRECERVVTVRADGGNDGLSIVEERRVFTRPGAITSKLRRAWGLEGLKKQDGKRVEDDRHHAVDALVLAATTESLLNRLTVEVQQREREGRQDDIFHCSQPWPGFRVDVQRTVYGSETMPGIFVSRAERRRARGKAHDATVKQIRDIDGERIVFERKPIEKLTDKDLERIPVPEPYGKAADPKKLRDELVENLRAWIAAGKPKDKPPRSPKGDIIRKVRIETKDKVAVEINGGTVDRGDMARVDVFRKKNKKGVWEFYVIPIYPHQIVASALPPNRAVIAYKAESEWTAIDGCFEFAWSLNPMSYLELVKSNGELIEGYFRSMDRTTGAINLSPMSTNSETIRSIGVKTLSSFRKFTVDRLGRKFEIPREVRTWRGEACT

SEQ ID NO: 39 - protein, 1166 aa, Nitrobacter hamburgensis
MHVEIDFPHFSRGDSHLAMNKNEILRGSSVLYRLGLDLGSNSLGWFVTHLEKRGDRHEPVALGPGGVRIFPDGRDPQSGTSNAVDRRMARGARKRRDRFVERRKELIAALIKYNLLPDDARERRALEVLDPYALRKTALTDTLPAHHVGRALFHLNQRRGFQSNRKTDSKQSEDGAIKQAASRLATDKGNETLGVFFADMHLRKSYEDRQTAIRAELVRLGKDHLTGNARKKIWAKVRKRLFGDEVLPRADAPHGVRARATITGTKASYDYYPTRDMLRDEFNAIWAGQSAHHATITDEARTEIEHIIFYQRPLKPAIVGKCTLDPATRPFKEDPEGYRAPWSHPLAQRFRILSEARNLEIRDTGKGSRRLTKEQSDLVVAALLANREVKFDKLRTLLKLPAEARFNLESDRRAALDGDQTAARLSDKKGFNKAWRGFPPERQIAIVARLEETEDENELIAWLEKECALDGAAAARVANTTLPDGHCRLGLRAIKKIVPIMQDGLDEDGVAGAGYHIAAKRAGYDHAKLPTGEQLGRLPYYGQWLQDAVVGSGDARDQKEKQYGQFPNPTVHIGLGQLRRVVNDLIDKYGPPTEISIEFTRALKLSEQQKAERQREQRRNQDKNKARAEELAKFGRPANPRNLLKMRLWEELAHDPLDRKCVYTGEQISIERLLSDEVDIDHILPVAMTLDDSPANKIICMRYANRHKRKQTPSEAFGSSPTLQGHRYNWDDIAARATGLPRNKRWRFDANAREEFDKRGGFLARQLNETGWLARLAKQYLGAVTDPNQIWVVPGRLTSMLRGKWGLNGLLPSDNYAGVQDKAEEFLASTDDMEFSGVKNRADHRHHAIDGLVTALTDRSLLWKMANAYDEEHEKFVIEPPWPTMRDDLKAALEKMVVSHKPDHGIEGKLHEDSAYGFVKPLDATGLKEEEAGNLVYRKAIESLNENEVDRIRDIQLRTIVRDHVNVEKTKGVALADALRQLQAPSDDYPQFKHGLRHVRILKKEKGDYLVPIANRASGVAYKAYSAGENFCVEVFETAGGKWDGEAVRRFDANKKNAGPKIAHAPQWRDANEGAKLVMRIHKGDLIRLDHEGRARIMVVHRLDAAAGRFKLADHNETGNLDKRHATNNDIDPFRWLMASYNTLKKLAAVPVRVDELGRVWRVMPN

SEQ ID NO: 40 - protein, 641 aa, Nitrobacter hamburgensis
MHKRNSRSYRLGLDLGSNSLGWFVTHLEKRGDRYEPVALDPGGVRIFPDGRDPQSGMSNAVDRRMARGARKRRDRFVDPYALRKAALTNALPAHRVGRAIFHLNQRRGFQSNRKTDRKQSEDGAIKQAASKLKARMHEEAAPTLGAFFADMHLRKSYDDQQTAIRAELVRLGKDHLTGNARKKVWAKVRKRLFGDEVLRPKDTSDGARARATTTGTKASYDFYPTRAMLLDEFNAIWAAQREHHLAMTDEAKAEIEHIIFYHRPLKPAIVGKCTLDPATRPFKEDPEGYRAPWSHPLAQRFRILSEARNLEIRETGKTSRRLTKDQSDLVVAALLANREVKFDKLRTLLKLPAEARFNLESDRRSTATRPPHGCRTRRASIRRGAGFLRNGRSRSSPDWKKPKTKTNCSHGSKWNAHLTAQRPRASPIRRCRTAIAGSACAQSKRSCRSCRTSSMRMALRAPAITSWPSVPATTIPVDTFQQGGNAFGRILSVVTIELFAITDRVDPVQEQDARCFALRIAECRSDGLQHFAEVSLGLPPRNAAQDQRHSAGLCQSSCVGRFVPGTPCRRTPRSTSLHGKEPSAHAFGSTARSRPQLPASPRPCMSFRDGTSSSPARMPETLDRCAISRSNRSSVCRAERL

SEQ ID NO: 41 - protein, 1368 aa, Streptococcus pyogenes
MDKKYSIGLDIGTNSVGWAVITDDYKVPSKKFKVLGNTDRHSIKKNLIGALLFDSGEIAEATRLKRTARRRYTRRKNRICYLQEIFSNEMAKVDDSFFHRLEESFLVEEDKKHERHPIFGNIVDEVAYHEKYPTIYHLRKKLVDSTDKADLRLIYLALAHMIKFRGHFLIEGDLNPDNSDVDKLFIQLVQTYNQLFEENPINASGVDAKAILSARLSKSRRLENLIAQLPGEKKNGLFGNLIALSLGLTPNFKSNFDLAEDAKLQLSKDTYDDDLDNLLAQIGDQYADLFLAAKNLSDAILLSDILRLNSEITKAPLSASMIKRYDEHHQDLTLLKALVRQQLPEKYKEIFFDQSKNGYAGYIDGGASQEEFYKFIKPILEKMDGTEELLAKLNREDLLRKQRTFDNGSIPHQIHLGELHAILRRQEDFYPFLKDNREKIEKILTFRIPYYVGPLARGNSRFAWMTRKSEETITPWNFEEVVDKGASAQSFIERMTNFDKNLPNEKVLPKHSLLYEYFTVYNELTKVKYVTEGMRKPAFLSGEQKKAIVDLLFKTNRKVTVKQLKEDYFKKIECFDSVEISGVEDRFNASLGTYHDLLKIIKDKDFLDNEENEDILEDIVLTLTLFEDREMIEERLKTYAHLFDDKVMKQLKRRRYTVWGRLSRKLINGIRDKQSGKTILDFLKSDGFANRNFMQLIHDDSLTFKEDIQKAQVSGQGDSLHEHIANLAGSPAIKKGILQTVKVVDELVKVMGRHKPENIVIEMARENQTTQKGQKNSRERMKRIEEGIKELGSQILKEHPVENTQLQNEKLYLYYLQNGRDMYVDQELDINRLSDYDVDHIVPQSFIKDDSIDNKVLTRSDKNRGKSDNVPSEEVVKKMKNYWRQLLNAKLITQRKFDNLTKAERGGLSELDKAGFIKRQLVETRQITKHVAQILDSRMNTKYDENDKLIREVKVITLKSKLVSDFRKDFQFYKVREINNYHHAHDAYLNAVVGTALIKKYPKLESEFVYGDYKVYDVRKMLAKSEQEIGKATAKYFFYSNIMNFFKTEITLANGEIRKRPLIETNGETGEIVWDKGRDFATVRKVLSMPQVNIVKKTEVQTGGFSKESILPKRNSDKLIARKKDWDPKKYGGFDSPTVAYSVLVVAKVEKGKSKKLKSVKELLGITIMERSSFEKNPIDFLEAKGYKEVRKDLIIKLPKYSLFELENGRKRMLASAGELQKGNELALPSKYVNFLYLASHYEKLKGSPEDNEQKQLFVEQHKHYLDEIIEQISEFSKRVILADANLDKVLSAYNKHRDKPIREQAENIIHLFTLTNLGAPTAFKYFDTTIDRKRYTSTKEVLDATFIHQSITGLYETRIDLSQLGGD

SEQ ID NO: 42 - protein, 1368 aa, Streptococcus pyogenes
MDKKYSIGLDIGTNSVGWAVITDDYKVPSKKFKVLGNTDRHSIKKNLIGALLFDSGETAEATRLKRTARRRYTRRKNRICYLQEIFSNEMAKVDDSFFHRLEESFLVEEDKKHERHPIFGNIVDEVAYHEKYPTIYHLRKKLVDSTDKADLRLIYLALAHMIKFRGHFLIEGDLNPDNSDVDKLFIQLVQTYNQLFEENPINASGVDAKAILSARLSKSRRLENLIAQLPGEKKNGLFGNLIALSLGLTPNFKSNFDLAEDAKLQLSKDTYDDDLDNLLAQIGDQYADLFLAAKNLSDAILLSDILRLNSEITKAPLSASMIKRYDEHHQDLTLLKALVRQQLPEKYKEIFFDQSKNGYAGYIDGGASQEEFYKFIKPILEKMDGTEELLAKLNREDLLRKQRTFDNGSIPHQIHLGELHAILRRQEDFYPFLKDNREKIEKILTFRIPYYVGPLARGNSRFAWMTRKSEETITPWNFEEVVDKGASAQSFIERMTNFDKNLPNEKVLPKHSLLYEYFTVYNELTKVKYVTEGMRKPAFLSGEQKKAIVDLLFKTNRKVTVKQLKEDYFKKIECFDSVEISGVEDRFNASLGTYHDLLKIIKDKDFLDNEENEDILEDIVLTLTLFEDREMIEERLKTYAHLFDDKVMKQLKRRRYTGWGRLSRKLINGIRDKQSGKTILDFLKSDGFANRNFMQLIHDDSLTFKEDIQKAQVSGQGDSLHEHIANLAGSPAIKKGILQTVKVVDELVKVMGRHKPENIVIEMARENQTTQKGQKNSRERMKRIEEGIKELGSQILKEHPVENTQLQNEKLYLYYLQNGRDMYVDQELDINRLSDYDVDHIVPQSFIKDDSIDNKVLTRSDKNRGKSDNVPSEEVVKKMKNYWRQLLNAKLITQRKFDNLTKAERGGLSELDKAGFIKRQLVETRQITKHVAQILDSRMNTKYDENDKLIREVKVITLKSKLVSDFRKDFQFYKVREINNYHHAHDAYLNAVVGTALIKKYPKLESEFVYGDYKVYDVRKMIAKSEQEIGKATAKYFFYSNIMNFFKTEITLANGEIRKRPLIETNGETGEIVWDKGRDFATVRKVLSMPQVNIVKKTEVQTGGFSKESILPKRNSDKLIARKKDWDPKKYGGFDSPTVAYSVLVVAKVEKGKSKKLKSVKELLGLTIMERSSFEKNPIDFLEAKGYKEVKKDLIIKLPKYSLFELENGRKRMLASAGELQKGNELALPSKYVNFLYLASHYEKLKGSPEDNEQKQLFVEQHKHYLDEIIEQISEFSKRVILADANLDKVLSAYNKHRDKPIREQAENIIHLFTLTNLGAPAAFKYFDTTIDRKRYTSTKEVLDATLIHQSITGLYETRIDLSQLGGD

SEQ ID NO: 43 - protein, 1368 aa, Streptococcus pyogenes
MDKKYSIGLDIGTNSVGWAVITDDYKVPSKKFKVLGNTDRHSIKKNLIGALLFDSGEIAEATRLKRTARRRYTRRKNRICYLQEIFSNEMAKVDDSFFHRLEESFLVEEDKKHERHPIFGNIVDEVAYHEKYPTIYHLRKKLVDSTDKADLRLIYLALAHMIKFRGHFLIEGDLNPDNSDVDKLFIQLVQTYNQLFEENPINASGVDAKAILSARLSKSRRLENLIAQLPGEKKNGLFGNLIALSLGLTPNFKSNFDLAEDAKLQLSKDTYDDDLDNLLAQIGDQYADLFLAAKNLSDAILLSDILRLNSEITKAPLSASMIKRYDEHHQDLTLLKALVRQQLPEKYKEIFFDQSKNGYAGYIDGGASQEEFYKFIKPILEKMDGTEELLAKLNREDLLRKQRTFDNGSIPHQIHLGELHAILRRQEDFYPFLKDNREKIEKILTFRIPYYVGPLARGNSRFAWMTRKSEETITPWNFEEVVDKGASAQSFIERMTNFDKNLPNEKVLPKHSLLYEYFTVYNELTKVKYVTEGMRKPAFLSGEQKKAIVDLLFKTNRKVTVKQLKEDYFKKIECFDSVEISGVEDRFNASLGTYHDLLKIIKDKDFLDNEENEDILEDIVLTLTLFEDREMIEERLKTYAHLFDDKVMKQLKRRRYTGWGRLSRKLINGIRDKQSGKTILDFLKSDGFANRNFMQLIHDDSLTFKEDIQKAQVSGQGDSLHEHIANLAGSPAIKKGILQTVKVVDELVKVMGRHKPENIVIEMARENQTTQKGQKNSRERMKRIEEGIKELGSQILKEHPVENTQLQNEKLYLYYLQNGRDMYVDQELDINRLSDYDVDHIVPQSFIKDDSIDNKVLTRSDKNRGKSDNVPSEEVVKKMKNYWRQLLNAKLITQRKFDNLTKAERGGLSELDKAGFIKRQLVETRQITKHVAQILDSRMNTKYDENDKLIREVKVITLKSKLVSDFRKDFQFYKVREINNYHHAHDAYLNAVVGTALIKKYPKLESEFVYGDYKVYDVRKMLAKSEQEIGKATAKYFFYSNIMNFFKTEITLANGEIRKRPLIETNGETGEIVWDKGRDFATVRKVLSMPQVNIVKKTEVQTGGFSKESILPKRNSDKLIARKKDWDPKKYGGFDSPTVAYSVLVVAKVEKGKSKKLKSVKELLGITIMERSSFEKNPIDFLEAKGYKEVRKDLIIKLPKYSLFELENGRKRMLASAGELQKGNELALPSKYVNFLYLASHYEKLKGSPEDNEQKQLFVEQHKHYLDEIIEQISEFSKRVILADANLDKVLSAYNKHRDKPIREQAENIIHLFTLTNLGAPTAFKYFDTTIDRKRYTSTKEVLDATFIHQSITGLYETRIDLSQLGGD

SEQ ID NO: 44 - protein, 1371 aa, Streptococcus pyogenes
MDKKYSIGLDIGTNSVGWAVITDDYKVPSKKFKVLGNTDRHSIKKNLIGALLFDSGETAEATRLKRTARRRYTRRKNRICYLQEIFSNEMAKVDDSFFHRLEESFLVEEDKKHERHPIFGNIVDEVAYHEKYPTIYHLRKKLADSTDKADLRLIYLALAHMIKFRGHFLIEGDLNPDNSDVDKLFIQLVQTYNQLFEENPINASRVDAKAILSARLSKSRRLENLIAQLPGEKKNGLFGNLIALSLGLTPNFKSNFDLAEDAKLQLSKDTYDDDLDNLLAQIGDQYADLFLAAKNLSDATLLSDILRVNSEITKAPLSASMIKRYDEHHQDLTLLKALVRQQLPEKYKEIFFDQSKNGYAGYIDGGASQEEFYKFIKPILEKMDGTEELLAKLNREDLLRKQRTFDNGSIPHQIHLGELHAILRRQEDFYPFLKDNREKIEKILTFRIPYYVGPLARGNSRFAWMTRKSEETITPWNFEEVVDKGASAQSFIERMTNFDKNLPNEKVLPKHSLLYEYFTVYNELTKVKYVTEGMRKPAFLSGEQKKAIVDLLFKTNRKVTVKQLKEDYFKKIECFDSVEISGVEDRFNASLGTYHDLLKIIKDKDFLDNEENEDILEDIVLTLTLFEDKEMIEERLKTYAHLFDDKVMKQLKRRHYTGWGRLSRKLINGIRDKQSGKTILDFLKSDGFANRNFIQLIHDDSLTFKEAIQKAQVSGQGHSLHEQIANLAGSPAIKKGILQSVKVVDELVKVMGHKPENIVIEMARENQTTQKGQKNSRERMKRIEEGIKELGSQILKEHPVENTQLQNEKLYLYYLQNGRDMYVDQELDINRLSDYDVDHIVPQSFIKDDSIDNKVLTRSDKNRGKSDDVPSEEVVKKMKNYWRQLLNAKLITQRKFDNLTKAERGGLSELDKAGFIKRQLVETRQITKHVAQILDSRMNTKYDENDKLIREVKVITLKSKLVSDFRKDFQFYKVREINNYHHAHDAYLNAVVGTALIKKYPKLESEFVYGDYKVYDVRKMIAKSEQEIGKATAKRFFYSNIMNFFKTEITLANGEIRKRPLIETNEETGEIVWDKGRDFATVRKVLSMPQVNIVKKTEVQTGALTNESIYARGSFDKLISRKHRFESSKYGGFGSPTVTYSVLVVAKSKVQDGKVKKIKTGKELIGITLLDKLVFEKNPLKFIEDKGYGNVQIDKCIKLPKYSLFEFENGTRRMLASVMANNNSRGDLQKANEMFLPAKLVTLLYHAHKIESSKELEHEAYILDHYNDLYQLLSYIERFASLYVDVEKNISKVKELFSNIESYSISEICSSVINLLTLTASGAPADFKFLGTTIPRKRYGSPQSILSSTLIHQSITGLYETRIDLSQLGSD

SEQ ID NO: 45 - protein, 1121 aa, Streptococcus thermophilus
MSDLVLGLDIGIGSVGVGILNKVTGEIIHKNSRIFPAAQAENNLVRRTNRQGRRLARRKKHRRVRLNRLFEESGLITDFTKISINLNPYQLRVKGLTDELSNEELFIALKNMVKHRGISYLDDASDDGNSSVGDYAQIVKENSKQLETKTPGQIQLERYQTYGQLRGDFTVEKDGKKHRLINVFPTSAYRSEALRILQTQQEFNPQITDEFINRYLEILTGKRKYYHGPGNEKSRTDYGRYRTSGETLDNIFGILIGKCTFYPDEFRAAKASYTAQEFNLLNDLNNLTVPTETKKLSKEQKNQIINYVKNEKAMGPAKLFKYIAKLLSCDVADIKGYRIDKSGKAEIHTFEAYRKMKTLETLDIEQMDRETLDKLAYVLTLNTEREGIQEALEHEFADGSFSQKQVDELVQFRKANSSIFGKGWHNFSVKLMMELIPELYETSEEQMTILTRLGKQKTTSSSNKTKYIDEKLLTEEIYNPVVAKSVRQAIKIVNAAIKEYGDFDNIVIEMARETNEDDEKKAIQKIQKANKDEKDAAMLKAANQYNGKAELPHSVFHGHKQLATKIRLWHQQGERCLYTGKTISIHDLINNSNQFEVDHILPLSITFDDSLANKVLVYATANQEKGQRTPYQALDSMDDAWSFRELKAFVRESKTLSNKKKEYLLTEEDISKFDVRKKFIERNLVDTRYASRVVLNALQEHFRAHKIDTKVSVVRGQFTSQLRRHWGIEKTRDTYHHHAVDALIIAASSQLNLWKKQKNTLVSYSEDQLLDIETGELISDDEYKESVFKAPYQHFVDTLKSKEFEDSILFSYQVDSKFNRKISDATIYATRQAKVGKDKADETYVLGKIKDIYTQDGYDAFMKIYKKDKSKFLMYRHDPQTFEKVIEPILENYPNKQINEKGKEVPCNPFLKYKEEHGYIRKYSKKGNGPEIKSLKYYDSKLGNHIDITPKDSNNKVVLQSVSPWRADVYFNKTTGKYEILGLKYADLQFEKGTGTYKISQEKYNDIKKKEGVDSDSEFKFTLYKNDLLLVKDTETKEQQLFRFLSRTMPKQKHYVELKPYDKQKFEGGEALIKVLGNVANSGQCKKGLGKSNISIYKVRTDVLGNQHIIKNEGDKPKLDF

SEQ ID NO: 46 - protein, 1388 aa, Streptococcus thermophilus
MTKPYSIGLDIGTNSVGWAVTTDNYKVPSKKMKVLGNTSKKYIKKNLLGVLLFDSGITAEGRRLKRTARRRYTRRRNRILYLQEIFSTEMATLDDAFFQRLDDSFLVPDDKRDSKYPIFGNLVEEKAYHDEFPTIYHLRKYLADSTKKADLRLVYLALAHMIKYRGHFLIEGEFNSKNNDIQKNFQDFLDTYNAIFESDLSLENSKQLEEIVKDKISKLEKKDRILKLFPGEKNSGIFSEFLKLIVGNQADFRKCFNLDEKASLHFSKESYDEDLETLLGYIGDDYSDVFLKAKKLYDAILLSGFLTVTDNETEAPLSSAMIKRYNEHKEDLALLKEYIRNISLKTYNEVFKDDTKNGYAGYIDGKTNQEDFYVYLKKLLAEFEGADYFLEKIDREDFLRKQRTFDNGSIPYQIHLQEMRAILDKQAKFYPFLAKNKERIEKILTFRIPYYVGPLARGNSDFAWSIRKRNEKITPWNFEDVIDKESSAEAFINRMTSFDLYLPEEKVLPKHSLLYETFNVYNELTKVRFIAESMRDYQFLDSKQKKDIVRLYFKDKRKVTDKDIIEYLHAIYGYDGIELKGIEKQFNSSLSTYHDLLNIINDKEFLDDSSNEAIIEEIIHTLTIFEDREMIKQRLSKFENIFDKSVLKKLSRRHYTGWGKLSAKLINGIRDEKSGNTILDYLIDDGISNRNFMQLIHDDALSFKKKIQKAQIIGDEDKGNIKEVVKSLPGSPAIKKGILQSIKIVDELVKVMGGRKPESIVVEMARENQYTNQGKSNSQQRLKRLEKSLKELGSKILKENIPAKLSKIDNNALQNDRLYLYYLQNGKDMYTGDDLDIDRLSNYDIDHIIPQAFLKDNSIDNKVLVSSASNRGKSDDVPSLEVVKKRKTFWYQLLKSKLISQRKFDNLTKAERGGLSPEDKAGFIQRQLVETRQITKHVARLLDEKFNNKKDENNRAVRTVKIITLKSTLVSQFRKDFELYKVREINDFHHAHDAYLNAVVASALLKKYPKLEPEFVYGDYPKYNSFRERKSATEKVYFYSNIMNIFKKSISLADGRVIERPLIEVNEETGESVWNKESDLATVRRVLSYPQVNVVKKVEEQNHGLDRGKPKGLFNANLSSKPKPNSNENLVGAKEYLDPKKYGGYAGISNSFTVLVKGTIEKGAKKKITNVLEFQGISILDRINYRKDKLNFLLEKGYKDIELIIELPKYSLFELSDGSRRMLASILSTNNKRGEIHKGNQIFLSQKFVKLLYHAKRISNTINENHRKYVENHKKEFEELFYYILEFNENYVGAKKNGKLLNSAFQSWQNHSIDELCSSFIGPTGSERKGLFELTSRGSAADFEFLGVKIPRYRDYTPSSLLKDATLIHQSVTGLYETRIDLAKLGEG

SEQ ID NO: 47 - protein, 1138 aa, Acidothermus cellulolyticus
MGGSEVGTVPVTWRLGVDVGERSIGLAAVSYEEDKPKEILAAVSWIHDGGVGDERSGASRLALRGMARRARRLRRFRRARLRDLDMLLSELGWTPLPDKNVSPVDAWLARKRLAEEYVVDETERRRLLGYAVSHMARHRGWRNPWTTIKDLKNLPQPSDSWERTRESLEARYSVSLEPGTVGQWAGYLLQRAPGIRLNPTQQSAGRRAELSNATAFETRLRQEDVLWELRCIADVQGLPEDVVSNVIDAVFCQKRPSVPAERIGRDPLDPSQLRASRACLEFQEYRIVAAVANLRIRDGSGSRPLSLEERNAVIEALLAQTERSLTWSDIALEILKLPNESDLTSVPEEDGPSSLAYSQFAPFDETSARIAEFIAKNRRKIPTFAQWWQEQDRTSRSDLVAALADNSIAGEEEQELLVHLPDAELEALEGLALPSGRVAYSRLTLSGLTRVMRDDGVDVHNARKTCFGVDDNWRPPLPALHEATGHPVVDRNLAILRKFLSSATMRWGPPQSIVVELARGASESRERQAEEEAARRAHRKANDRIRAELRASGLSDPSPADLVRARLLELYDCHCMYCGAPISWENSELDHIVPRTDGGSNRHENLAITCGACNKEKGRRPFASWAETSNRVQLRDVIDRVQKLKYSGNMYWTRDEFSRYKKSVVARLKRRTSDPEVIQSIESTGYAAVALRDRLLSYGEKNGVAQVAVFRGGVTAEARRWLDISIERLFSRVAIFAQSTSTKRLDRRHHAVDAVVLTTLTPGVAKTLADARSRRVSAEFWRRPSDVNRHSTEEPQSPAYRQWKESCSGLGDLLISTAARDSIAVAAPLRLRPTGALHEETLRAFSEHTVGAAWKGAELRRIVEPEVYAAFLALTDPGGRFLKVSPSEDVLPADENRHIVLSDRVLGPRDRVKLFPDDRGSIRVRGGAAYIASFHHARVFRWGSSHSPSFALLRVSLADLAVAGLLRDGVDVFTAELPPWTPAWRYASIALVKAVESGDAKQVGWLVPGDELDFGPEGVTTAAGDLSMFLKYFPERHWVVTGFEDDKRINLKPAFLSAEQAEVLRTERSDRPDTLTEAGEILAQFFPRCWRATVAKVLCHPGLTVIRRTALGQPRWRRGHLPYSWRPWSADPWSGGTP

SEQ ID NO: 48 - protein, 1629 aa, Francisella novicida
MNFKILPIAIDLGVKNTGVFSAFYQKGTSLERLDNKNGKVYELSKDSYTLLMNNRTARRHQRRGIDRKQLVKRLFKLIWTEQLNLEWDKDTQQAISFLFNRRGFSFITDGYSPEYLNIVPEQVKAILMDIFDDYNGEDDLDSYLKLATEQESKISEIYNKLMQKILEFKLMKLCTDIKDDKVSTKTLKEITSYEFELLADYLANYSESLKTQKFSYTDKQGNLKELSYYHHDKYNIQEFLKRHATINDRILDTLLTDDLDIWNFNFEKFDFDKNEEKLQNQEDKDHIQAHLHHFVFAVNKIKSEMASGGRHRSQYFQEITNVLDENNHQEGYLKNFCENLHNKKYSNLSVKNLVNLIGNLSNLELKPLRKYFNDKIHAKADHWDEQKFTETYCHWILGEWRVGVKDQDKKDGAKYSYKDLCNELKQKVTKAGLVDFLLELDPCRTIPPYLDNNNRKPPKCQSLILNPKFLDNQYPNWQQYLQELKKLQSIQNYLDSFETDLKVLKSSKDQPYFVEYKSSNQQIASGQRDYKDLDARILQFIFDRVKASDELLLNEIYFQAKKLKQKASSELEKLESSKKLDEVIANSQLSQILKSQHTNGIFEQGTFLHLVCKYYKQRQRARDSRLYIMPEYRYDKKLHKYNNTGRFDDDNQLLTYCNHKPRQKRYQLLNDLAGVLQVSPNFLKDKIGSDDDLFISKWLVEHIRGFKKACEDSLKIQKDNRGLLNHKINIARNTKGKCEKEIFNLICKIEGSEDKKGNYKHGLAYELGVLLFGEPNEASKPEFDRKIKKFNSIYSFAQIQQIAFAERKGNANTCAVCSADNAHRMQQIKITEPVEDNKDKIILSAKAQRLPAIPTRIVDGAVKKMATILAKNIVDDNWQNIKQVLSAKHQLHIPIITESNAFEFEPALADVKGKSLKDRRKKALERISPENIFKDKNNRIKEFAKGISAYSGANLTDGDFDGAKEELDHIIPRSHKKYGTLNDEANLICVTRGDNKNKGNRIFCLRDLADNYKLKQFETTDDLEIEKKIADTIWDANKKDFKFGNYRSFINLTPQEQKAFRHALFLADENPIKQAVIRAINNRNRTFVNGTQRYFAEVLANNIYLRAKKENLNTDKISFDYFGIPTIGNGRGIAEIRQLYEKVDSDIQAYAKGDKPQASYSHLIDAMLAFCIAADEHRNDGSIGLEIDKNYSLYPLDKNTGEVFTKDIFSQIKITDNEFSDKKLVRKKAIEGFNTHRQMTRDGIYAENYLPILIHKELNEVRKGYTWKNSEEIKIFKGKKYDIQQLNNLVYCLKFVDKPISIDIQISTLEELRNILTTNNIAATAEYYYINLKTQKLHEYYIENYNTALGYKKYSKEMEFLRSLAYRSERVKIKSIDDVKQVLDKDSNFIIGKITLPFKKEWQRLYREWQNTTIKDDYEFLKSFFNVKSITKLHKKVRKDFSLPISTNEGKFLVKRKTWDNNFIYQILNDSDSRADGTKPFIPAFDISKNEIVEAIIDSFTSKNIFWLPKNIELQKVDNKNIFAIDTSKWFEVETPSDLRDIGIATIQYKIDNNSRPKVRVKLDYVIDDDSKINYFMNHSLLKSRYPDKVLEILKQSTIIEFESSGFNKTIKEMLGMKLAGIYNETSNN

SEQ ID NO: 49 - protein, 1068 aa, Verminephrobacter eiseniae
MNKAVAYRLALDLGSTSLGWAIFRLNEAREPTAIIRAGVRIFSDGRNANSEPLAVHRRVARAMRRRRDRLLKRKKRMHDQLVQHGFFPAEVAERKELERLNPYQLRAKGLHEALTPGEFARALFHINQRRGFKSNRKTDRKDNDSGALKQAISELRKRIQDSDCATAGEWFWKERMQQKPEGVRGQWVRARYRKTPSTTDEGKKRIGYDLYVDRAMVEQEFDALWAAQAALQPGLFTEAARAELKDTLLYQRDLRPVKPGRCTLLPAEERAPLALPSTQRFRILQEVNNLRLLDEALREVPLNLAQRDAVVSALEGKKELSFAAIRKLLTLSGKFNLEDEKRAELKGNATSVILARKDLFGDAWAGFDAAVQDEIVWRLVSQESEGALIAWLQQHTGVDGVCAEAIVNTRLPDGYGRLSRKALERIVPALQREVCTYDKAVQAAGFAHHSDLGFDFDYAEDEVQQVGEHTIASTGEVQAQYAFKQLPYYGKALQRHVAFGSGDAKDHEEKCYGKIANPTVHIGLNQVRTVVNALIRRYGHPTEVVVELARDLKQSREQKQQTQREQADNQKRNEDIRKRIAPILETSPERVRDRDIKKWILWEELNKKDIADRHCPYSGERISATMLLSEAVEIEHILPFSRTLDDSLNNRTVAMRRANRIKGDRTPWEARADFEAQGWRYEAILQRAEGMPPRKRYRFAEDGYQRWLGKDRNFLARALNDTSYLSRLAANYLRLVCPQGVRVIPGQMTDKLRGKFGLNSVLGLDGKKNRNDHRHHAVDACVIGVTDQGLMQRFANASKQARENGLTRLVQDMLLPWWPSYYDHVERAVRHIRVSHRPDHGFEGAMMKGTAHGIREDGIREDGRIKQRPKAKGSADHKTITLIPIDEPRQLARHGVDAEGKPLPYKGYASGSNYCIEITKNGKGKWEGQVISTFDAYRIKAAADAAARAGQVISTVEADSIVRKSGWERLRGAQSQNGQPLVMRLVIGDSVRMEVDGRDEVMRVVKMSGKEMVFAPVREANVDKRNNMPDEQDPFTYTYKRADQLRKAKARQVTISPIGELRDPGFKG

SEQ ID NO: 50 - protein, 1125 aa, Francisella tularensis
MNVKILPIAIDLDVKNTGVFSAFYQKGTSLEKLDNKNGKVYELSKDSYTLLMNNRTARRHQRRGIDRKQLVKRLFKLVWTEQLNLEWDKDTQQAISFLFNRRGFSFITDGYSTEYLNIVPEQVKAILMDIFDDYNGEDDLDSYLKLATEQESKISEIYNKLMQKILEFKLRKLCTDIKDDKVSTKTLKEITSYEFELLADYLANYSESLKIQKFSYTDKQGNLKELSYYHHDKYNIQEFLKRHATINDEILDTLLTDDFDIWNFNFEKFDFDKNEEKLQNQEDKDHTQAHLHHFVFAVNKIKSEMASGGRHRSQYFQEITNVLDENNHQEGYLKNFCENLHNKKYSNLSVKNLVNLVGNLSNLELKPLRKYFNDKIHAKADHWDEQKFTETYCHWILGEWRVGVKDQDKKDGAKYSYKDLCNELKQKVTKAGLIDFLLELDPCRTIPPYLDNNNRKPPKCQSLILNPKFLDNQYPNWQQYLQELKKLQSIQDYLDSFETDLKDLKSSKDQPYFVEYKSSNQQMASGQRDYKDLDARILQFIFDRVKASDELLLNEIYFQAKKLKQKASSELEKLESSKKLDEVIANSQLSQILKSQHTNGIFEQGTFLHLVCKYYKQRQRARDSRLYIMPEYRYDKKLDKYNNTGRFDDNNQLLTYCNHKPRQKRYQLLNDLAGVLQVSRNQLLSSVEEWFQQAQRVGEISKSQDEQIFEWLKSFKIASYCKAAVEMQKQYRGTLKNAIQTAIFRQSENINKNKNKNTGNQQQALSENSKDVKSLTADEKKLLKLIENIAKASQKIGESLGLNDKQIKKFNSIYSFAQIQQIAFAERKGNANTCAVCSADNAHRMQQIKITELVEDNKDNIILSAKAQRLPAIPTRIVDGAVKKMATILAKNIVDDNWQNIKQVLSAKHQLHIPIITESNAFEFEPALADVKGKSLKDRRKKALERISPENIFKDKNNRIKEFAKGISAYSGANLTDGDFDGAKEELDHIIPRSHKKYGTLNDEANLICVTRDDNKNIFAIDTSKWFEIETPSDLRDIGVATIQYKIDNNSRPKVRVKLDYVIDDDSKINYFMNHSLLKSRYPDKVLEILKQSTIIEFESSGFNKTIKEMLGMTLAGIYNETSNN

SEQ ID NO: 51 - protein, 1064 aa, Bradyrhizobium sp.
MKRTSLRAYRLGVDLGANSLGWFVVWLDDHGQPEGLGPGGVRIFPDGRNPQSKQSNAAGRRLARSARRRRDRYLQRRGKLMGLLVKHGLMPADEPARKRLECLDPYGLRAKALDEVLPLHHVGRALFHLNQRRGLFANRAIEQGDKDASAIKAAAGRLQTSMQACGARTLGEFLNRRHQLRATVRARSPVGGDVQARYEFYPTRAMVDAEFEAIWAAQAPHHPTMTAEAHDTIREAIFSQRAMKRPSIGKCSLDPATSQDDVDGFRCAWSHPLAQRFRIWQDVRNLAVVETGPTSSRLGKEDQDKVARALLQTDQLSFDEIRGLLGLPSDARFNLESDRRDHLKGDATGAILSARRHFGPAWHDRSLDRQIDIVALLESALDEAAIIASLGTTHSLDEAAAQRALSALLPDGYCRLGLRAIKRVLPLMEAGRTYAEAASAAGYDHALLPGGKLSPTGYLPYYGQWLQNDVVGSDDERDTNERRWGRLPNPTVHIGIGQLRRVVNELIRWHGPPAEITVELTRDLKLSPRRLAELEREQAENQRKNDKRTSLLRKLGLPASTHNLLKLRLWDEQGDVASECPYTGEAIGLERLVSDDVDIDHLIPFSISWDDSAANKVVCMRYANREKGNRTPFEAFGHRQGRPYDWADIAERAARLPRGKRWRFGPGARAQFEELGDFQARLLNETSWLARVAKQYLAAVTHPHRIHVLPGRLTALLRATWELNDLLPGSDDRAAKSRKDHRHHAIDALVAALTDQALLRRMANAHDDTRRKIEVLLPWPTFRIDLETRLKAMLVSHKPDHGLQARLHEDTAYGTVEHPETEDGANLVYRKTFVDISEKEIDRIRDRRLRDLVRAHVAGERQQGKTLKAAVLSFAQRRDIAGHPNGIRHVRLTKSIKPDYLVPIRDKAGRIYKSYNAGENAFVDILQAESGRWIARATTVFQANQANESHDAPAAQPIMRVFKGDMLRIDHAGAEKFVKIVRLSPSNNLLYLVEHHQAGVFQTRHDDPEDSFRWLFASFDKLREWNAELVRIDTLGQPWRRKRGLETGSEDATRIGWTRPKKWP

SEQ ID NO: 52 - protein, 1354 aa, Flavobacterium psychrophilum
MKKILGLDLGTNSIGWAFINEAENEIEVSSIVNTGVRIVPLTTDEESDFKKGNTISINADRTLKRGARRGLQRFKQRREALLETFNRIKFIATDFVYAETGAATTFSSYQLRAKSAVEAVTKEELVKVLLMLNKKRGYKSSRKAKTAEEGDAIDGMKIAKEIFENNLTPGQWVYNSLSKGGKFIPDFYHSDLQKELEKIVRFQNQFHSEQINDKLLADIQGKSRTQTSQHFSKTLNIPLAENKGTREETKLQHYQWRNEALANELDMKILAFIITEINNQINQSSGYLGAISDRSKELYFNQETVGQYQYKQLQENVHAKLKNQVFYRQDYLDEFEKIWETQAKFHSELNEKLKAEIRDITIFYQRKLKSQKHLVSFCEFEKGHKAIPKSSPLFQEFRIWQNLNNVVVKNETTKEVFELSEELKQLIAEELQFKESMTDVQMLTFCELKKGTHTVNFKKIEGNRTNTSIYKAFEKILEVEGYEIDFSKMKPLEIKETVAPIFETLNINTVILDFDPTIQGNDFDKQPYYQLWHLLYSAEDDDKLKETLKTKFGFKENHLPFILNINLQADYGSLSAKAIKKILPHLMDGHIYDKACLMVGYNHSSSLTTAQNNDRVLKDTLELLKKNSLRNPVVEKILNQMINVINAIMKDPAMGKPDEIRVELARELKANNEQRKKATSDINTATTEHERIRKLLHSEFNIPRVTRNDIIRYKLWLETGGISLYTGNPIKASDLFSKNYDIEHIIPKSRLFDDSFSNKTLCERQLNIDKSNKTAYSFLQEKLSENDFAAYENRVKDLFKTGKIKSYTKYKKLLMADNEIPEGFIDRQLRETQYIAKKAKEILLEVSRNVTATIGSVTDKLRQDWELVDVMKELNWEKYDKLGLTHIEEGKNGERLSKIKDWTKRNDHRHHAMDAITVAFTKPAYIQYLNNLNAKTQGENKANSIIGIENKHLYRDKNNKLRFISPMKNFREEAKKQLESILISYKAKNKVVTKNKNTTKKSGGTNQKIQLTPRGRLHKETVYGKLQQYATKEEKVNASFTEDYIQKVAKKEYREALLKRLEENDNDPKKAFTGKNALNKTPIYISLKDNIIVPEKVKTVWLETDYTIRKDITPDLKIDKVIDVGIKRILQNRLNEFNGDPKKAFVNLGESPIWLNKEKGIAIKRVTISGVSNAQALHTKKDHLGNEILDKNGNPIPVDFISTGNNHHVAIYRDEKGNLQEEVVSFYDAVIRRNLGLSVINKNHEKGWEFLFSMKQNEFFIFPSDGFNPHEIDLLNPNNYHLISPNIFRVQKISTKNYMFNHHLETKAVDGEMLKSKKELSKTSYHFIQTPTNLNGIIKVRINHLGKIVHLGEY

SEQ ID NO: 53 - protein, 1062 aa, Actinobacillus succinogenes
MNLNYILGLDLGIASVGWAVVEIDEQENPQRLIDVGVRTFDRAEVLKTGESLALARRLARSSRRLVKRRAERIKKAKRLLKAENLLLSADEILPNEAWQLRVKGLDQKLERQEWAAVLLHLLKHRGYLSQRKNESKSENKELGALLSGVAINHQILQSAEYRTPAEIAVNKFQAEEGHIRNQRGAYTHTFSRLDLLAEMELLFQRQATLGNPHTSTKLLENLTALLMWQKPALAGEAILKMLGKCTFEPTEYKAAKNSYSAERFVWLTKLNNLRILEQGAERALTDNERFALLDQPYEKAKLTYAQVRTLLGLSDEAIFKGLRYQGEDKKAVETKTTLMEVKAYHQIRKALEGLDLKAEWNELKNNPALLDEIGTAFSLYKTDDDIHRYLDGKLSESVLNALLENLNFDKFIQLSLKALQQILPLMLQGQRYDEAVSAIYGDHYGKKSDEIDRLLPNIPTDEIRNPVVLRTLTQARKVINAVVRLYGSPARIHIETGREVGKSYQDRKKLEKQQEENRKQRENAVKKFKEYFPNFVGEPKGKDILKMRLYELQQAKCLYSGKSLELYRLLEKGYVEVDHALPFSRTWDDSFNNKVLVLANENQNKGNATPYEWLDGKNNSEGWQHFVARVQTSGFSYAKKQRVLIQELDEKSFIERNLNDTRYVARFLCNHIADNMLLTGKGKRKVFASNGQITALLRGCWGLQKVRENNDRHHALDAVVVACSTKSMQDKITKFVKYKEGRLFKDKKDGVYKGERINRETGEIISLHFPTPWKFFKENVEIRIFSENPKLELENRLPDYPQYNHEFVQPLFVSRMPTRKMTGQGHMETVKSAKRLDKGLSVLKVPLTQLKLSDLERMVNREREMALYEALKECLEQFGNDPAKAFAEPFYKKGGALVKAVRVEQTQKSGVLVRNGNGVADNATGSIVRVDVFTKGGKYFLVPIYTWQVAKGILPNKAVIQGKDESEWEEMDENAVFQFSMHKNDLIKVKTKKGEIFGYFNGLDRATGSIEIEEHDLEKSKGKNGSHRGLGVKTAFFLEKYQVDELGKNIRPCRPTKRQHVR

SEQ ID NO: 54 - protein, 1340 aa, Dorea longicatena
MEQEYYLGLDMGTGSVGWAVTDSEYHVLRKHGKALWGVRLFESASTAEERRMFRTSRRRLDRRNWRIEILQEIFAEEISKKDPGFFLRMKESKYYPEDKRDINGNCPELPYALFVDDDFTDKDYHKKFPTIYHLRKMLMNTEETPDIRLVYLAIHHMMKHRGHFLLSGDINEIKEFGTTFSKLLENIKNEELDWNLELGKEEYAVVESILKDNMLNRSTKKTRLIKALKAKSICEKAVLNLLAGGTVKLSDIFGLEELNETERPKISFADNGYDDYIGEVENELGEQFYIIETAKAVYDWAVLVEILGKYTSISEAKVATYEKHKSDLQFLKKIVRKYLTKEEYKDIFVSTSDKLKNYSAYIGMTKINGKKVDLQSKRCSKEEFYDFIKKNVLKKLEGQPEYEYLKEELERETFLPKQVNRDNGVIPYQIHLYELKKILGNLRDKIDLIKENEDKLVQLFEFRIPYYVGPLNKIDDGKEGKFTWAVRKSNEKIYPWNFENVVDIEASAEKFIRRMTNKCTYLMGEDVLPKDSLLYSKYMVLNELNNVKLDGEKLSVELKQRLYTDVFCKYRKVTVKKIKNYLKCEGIISGNVEITGIDGDFKASLTAYHDFKEILTGTELAKKDKENIITNIVLFGDDKKLLKKRLNRLYPQITPNQLKKICALSYTGWGRFSKKFLEEITAPDPETGEVWNIITALWESNNNLMQLLSNEYRFMEEVETYNMGKQTKTLSYETVENMYVSPSVKRQIWQTLKIVKELEKVMKESPKRVFIEMAREKQESKRTESRKKQLIDLYKACKNEEKDWVKELGDQEEQKLRSDKLYLYYTQKGRCMYSGEVIELKDLWDNTKYDIDHIYPQSKTMDDSLNNRVLVKKKYNATKSDKYPLNENIRHERKGFWKSLLDGGFISKEKYERLIRNTELSPEELAGFIERQIVETRQSTKAVAEILKQVFPESEIVYVKAGTVSRFRKDFELLKVREVNDLHHAKDAYLNIVVGNSYYVKFTKNASWFIKENPGRTYNLKKMFTSGWNIERNGEVAWEVGKKGTIVTVKQIMNKNNILVTRQVHEAKGGLFDQQIMKKGKGQIAIKETDERLASIEKYGGYNKAAGAYFMLVESKDKKGKTIRTIEFIPLYLKNKIESDESIALNFLEKGRGLKEPKILLKKIKIDTLFDVDGFKMWLSGRTGDRLLFKCANQLILDEKIIVTMKKIVKFIQRRQENRELKLSDKDGIDNEVLMEIYNTFVDKLENTVYRIRLSEQAKTLIDKQKEFERLSLEDKSSTLFEILHIFQCQSSAANLKMIGGPGKAGILVMNNNISKCNKISIINQSPTGIFENEIDLLKI

SEQ ID NO: 55 - protein, 984 aa, Campylobacter jejuni
MAKILAFDIGISSIGWAFSENDELKDCGVRIFTKAENPKTGESLALPRRIARSARKRLARRKARLNHLKHLIANEFKLNYEDYQSFDEILAKAYKGSLISPYELRFRALNELLSKQDFARVILHIAKRRGYDDIKNNGDEEKGKILKAIKQNEEKLANYQSVGEYLYKEYFQKFKENSKEFINVRNKKESYERCIAQSFLKDELKLIFKKQREFGFSFSKKFEEEVLSVAFYKRALKDFSHLVGNCSFFTDEKRAPKNSPLAFMFVALTRIINLLNNLKNTLYTKDDLNALLNEVLKNGTLTYKQTKKLLGLSDDYEFKGEKGNYFIEFKKYKEFIKALGEHSLSQDDLNEIAKDITLIKDEIKLKKALAKYDLNENQIDNLSKLEFKDHLNISFKALKLITPLMLEGKKYDEACNELTLKVAINEDKKDFLPAFNETYYKDEVTNPVVLRAIKEYRKVLNALLKKYGKVHKINIELAREVGKNHSQRAKIEKEQNENYKAKKDAELECEKLGLKINSKNILKLRLFKEQKEFCVYSGEKIKLSDLQDEKMLEIDHIYPYSRSFDDSYMNKVLVFTKQNQEKLNQTPFEAFGNDSAKWQKIEVLAKNLPTKKQKRILDKNYKDKEQKDFKDRNLNDTRYIARLVLNYTKDYLDFLPLSDDENTKLNDTQKGSKVHVEAKSGMLTSALRHTWGFSTKDRNNHLHHAIDAVIIAYANNSIVKAFSDFKKEQESNTAELYAKKISELDYKNKRKFFEPFSGFRQKVLDKIDEIFVSKPERKKPSGALHEETFRKEEEFYQSYGGKEGVLKALELGKIRKVNGKIVKNGDMFRVDIFKHKKTNKFYAVPIYTMDFALKVLPNKAVARSKKGEIKDWILMDENYEFCFSLYKDSLILIQTKDMQEPEFVYYNAFTSSTVSLIVSKHDNKFETLSKNQKILFKNANEKEVIAKSIGIQNLKVFEKYIVSALGEVTKAEFRQREEFKNELR

SEQ ID NO: 56 - protein, 1037 aa, Parvibaculum lavamentivorans
MERIFGFDIGTTSIGFSVIDYSSTQSAGNIQRLGVRIFPEARDPDGTPLNQQRRQKRMMRRQLRRRRIRRKALNETLHEAGFLPAYGSADWPVVMADEPYELRRRGLEEGLSAYEFGRAIYHLAQHRHFKGRELEESDTPDPDVDDEKEAANERAATLKALKNEQTTLGAWLARRPPSDRKRGIHAHRNVVAEEFERLWEVQSKFHPALKSEEMRARISDTIFAQRPVFWRKNTLGECRFMPGEPLCPKGSWLSQQRRMLEKLNNLAIAGGNARPLDAEERDAILSKLQQQASMSWPGVRSALKALYKQRGEPGAEKSLKFNLELGGESKLLGNALEAKLADMFGPDWPAHPRKQEIRHAVHERLWAADYGETPDKKRVIILSEKDRKAHREAAANSFVADFGITGEQAAQLQALKLPTGWEPYSIPALNLFLAELEKGERFGALVNGPDWEGWRRTNFPHRNQPTGEILDKLPSPASKEERERISQLRNPTVVRTQNELRKVVNNLIGLYGKPDRIRIEVGRDVGKSKREREEIQSGIRRNEKQRKKATEDLIKNGIANPSRDDVEKWILWKEGQERCPYTGDQIGFNALFREGRYEVEHIWPRSRSFDNSPRNKTLCRKDVNIEKGNRMPFEAFGHDEDRWSAIQIRLQGMVSAKGGTGMSPGKVKRFLAKTMPEDFAARQLNDTRYAAKQILAQLKRLWPDMGPEAPVKVEAVTGQVTAQLRKLWTLNNILADDGEKTRADHRHHAIDALTVACTHPGMTNKLSRYWQLRDDPRAEKPALTPPWDTIRADAEKAVSEIVVSHRVRKKVSGPLHKETTYGDTGTDIKTKSGTYRQFVTRKKIESLSKGELDEIRDPRIKEIVAAHVAGRGGDPKKAFPPYPCVSPGGPEIRKVRLTSKQQLNLMAQTGNGYADLGSNHHIAIYRLPDGKADFEIVSLFDASRRLAQRNPIVQRTRADGASFVMSLAAGEAIMIPEGSKKGIWIVQGVWASGQVVLERDTDADHSTTTRPMPNPILKDDAKKVSIDPIGRVRPSND

SEQ ID NO: 57 - protein, 1107 aa, Eubacterium ventriosum
MGYTVGLDIGVASVGVAVLDENDNIVEAVSNIFDEADTSNNKVRRTLREGRRTKRRQKTRIEDFKQLWETSGYIIPHKLHLNIIELRNKGLTELLSLDELYCVLLSMLKHRGISYLEDADDGEKGNAYKKGLAFNEKQLKEKMPCEIQLERMKKYGKYHGEFIIEINDEKEYQSNVFTTKAYKKELEKIFETQRCNGNKINTKFIKKYMEIYERKREYYIGPGNEKSRTDYGIYTTRTDEEGNFIDEKNIFGKLIGKCSVYPEEYRASSASYTAQEFNLLNDLNNLKINNEKLTEFQKKEIVEIIKDASSVNMRKIIKKVIDEDIEQYSGARIDKKGKEIYHTFEIYRKLKKELKTINVDIDSFTREELDKTMDILTLNTERESIVKAFDEQKFVYEENLIKKLIEFRKNNQRLFSGWHSFSYKAMLQLIPVMYKEPKEQMQLLTEMNVFKSKKEKYVNYKYIPENEVVKEIYNPVVVKSIRTTVKILNALIKKYGYPESVVIEMPRDKNSDDEKEKIDMNQKKNQEEYEKILNKIYDEKGIEITNKDYKKQKKLVLKLKLWNEQEGLCLYSGKKIAIEDLLNHPEFFEIDHIIPKSISLDDSRSNKVLVYKTENSIKENDTPYHYLTRINGKWGFDEYKANVLELRRRGKIDDKKVNNLLCMEDITKIDVVKGFINRNLNDTRYASRVVLNEMQSFFESRKYCNTKVKVIRGSLTYQMRQDLHLKKNREESYSHHAVDAMLIAFSQKGYEAYRKIQKDCYDFETGEILDKEKWNKYIDDDEFDDILYKERMNEIRKKIIEAEEKVKYNYKIDKKCNRGLCNQTIYGTREKDGKIHKISSYNIYDDKECNSLKKMINSGKGSDLLMYNNDPKTYRDMLKILETYSSEKNPFVAYNKETGDYFRKYSKNHNGPKVEKVKYYSGQINSCIDISHKYGHAKNSKKVVLVSLNPYRTDVYYDNDTGKYYLVGVKYNHIKCVGNKYVIDSETYNELLRKEGVLNSDENLEDLNSKNITYKFSLYKNDIIQYEKGGEYYTERFLSRIKEQKNLIETKPINKPNFQRKNKKGEWENTRNQIALAKTKYVGKLVTDVLGNCYIVNMEKFSLVVDK

SEQ ID NO: 58 - protein, 1136 aa, Streptococcus gordonii
MNGLVLGLDIGIASVGVGILEKDTGKIIHASSRLFPAATADNNVERRSNRQGRRLNRRKKHRSVRLQDLFEGYGLLTDFSKVSMNLNPYQLRVQGMENQLTNEELFVALKNIVKRRGISYLDDASEDGGTVSSDYGKAVEENRKLLAEKTPGQIQLERFEKYGQLRGDFTVEENGEKHRLINVFSTSAYRKEAERILRKQQEFNSKITDEFIEDYLIILTGKRKYYHGPGNEKSRTDYGRFRTDGTTLDNIFGILIGKCTFYTEEYRASKASYTAQEFNLLNDLNNLTVPTETKKLSEEQKKLIIEYAKSAKTLGASTLLKYIAKMIDASVDQIRGYRVDVNNKPEMHTFEVYRKMQSLETIKVEELPRKVLDELAHILTLNTEREGIEEAINSKLKDIFNRDQVLELVQFRKNNSSLFSKGWHNFSIKLMMELIPELYETSEEQMTILTRLGKQRSKETSKRTKYIDEKELTEEIYNPVVAKSVRQAIKIINEATKKYGIFDNIVIEMARENNEEDAKKDYIKRQKANQDEKNAAMEKAAFQYNGKKELPDNIFHGHKELTTKIRLWHQQGEKCLYTGKNIPISDLIHNQYKYEIDHILPLSLSFDDSLSNKVLVLATANQEKGQRTPFQALDSMDDAWSYREFKSYVKDSKLLSNKKKDYLLTEEDISKIEVKQKFIERNLVDTRYSSRVVLNALQDFYKSHQLDTTISVVRGQFTSQLRRKWGIEKSRETYHHHAVDALIIAASSQLRLWKKHSNPLIAYKEGQFVDSETGEIVSLSDEEYKELVFKAPYDHFVDTLRSKKFEDSILFSYQVDSKYNRKISDATIYATRKAKLDKEKKEYTYTLGKIKDIYALGTKTPSKTGFYKFLDLYKTDKSQFLMYQKDRKTWDEVIEKIIEQYRPFKEYDKNGKEVDFNPFEKYRIGNGPIRKYSKKGNGPEIKSLKYYDILLGKHKNITPDGSRNTVALLSLNPWRTDVYYNSETKKYEFLGLKYADLCFEEGGAYGISEVKYKKIREKEGIGKNSEFKFTLYKNDLILIKDTETNCQQFFRFWSRTGKDNPKSFEKHKIELKPYEKAKFEKGEELKVLGKVPPSSNQFQKNMQIENLSIYKVKTDILGNKHFIKKEGDEPKLKFKK

SEQ ID NO: 59 - protein, 984 aa, Campylobacter jejuni
MARILAFDIGISSIGWAFSENDELKDCGVRIFTKAENPKTGESLALPRRLARSARKRLARRKARLNHLKHLIANEFKLNYEDYQSFDESLAKAYKGSLISPYELRFRALNELLSKQDFARVILHIAKRRGYDDIKNNGDEEKSEILKAIKQNEEKLVNYQSVGEYLYKEYFQKFKENSKEFINVRNKKESYERCITQSFLKDELKLIFQKQREFGFSFSKKFEEEVLSVAFYKRALKDFSHLVGNCSFFTDEKRAPKNSPLAFMFVALTRIINILNNLKNTEGILYTKDDLNALLNEVLKNGTLTYKQTKKLLGLSDDYEFKGEKGTYFIEFKKYKEFIKALGEHNLSQDDLNEIAKDITLIKDEIKLKKALAKYDLNQNQIDSLSKLEFKDHLNISFKALKLITPLMLEGKKYDEACNELNLKVAINEDKKDFLPAFNETYYKDEVTNPVVLRAIKEYRKILNALLKKYGKVHKINIELAREVGKNHSQRAKIEKEQNENYKAKKDAEIECEKLGLKINSKNILKLRLFKEQKEFCAYSGEKIKLSDLQDEKMLEIDHIYPYSRSFDDSYMNKVLVFTKQNQEKLNKTPFEAFGNDSTKWQKIEVLAKNLPEKKQKRILDKNYKDKEQKDFKDRNLNDTRYIARLVLNYTKDYLDFLPLSDDENTKLNDTQKGSKVHVEAKSGMLTSALRHTWGFSAKDRNNHLHHAIDAAIIAYANNSIVKAFSDFKKEQESNSVELYAKKISELDYKNKRKFFEPFSGFRQKVLDKIDEIFVSKPERKKPSGALHEETFRKEEEFYQSYGGKEGVLKALELGKIRKVNGKIVKNGDMFRVDIFKHKKTNKFYAVPIYTMDFALKVLPNKAVARSKKGEIKDWILMDENYEFCFSLYKDSLILIQTKDMQEPELVYFNAFTSSTVSLIVSKHDNKFETLSKNQKILFKNANEKEVIAKSIGIQNLKVFEKYIVSALGEVTKAEFRQREDFKK

SEQ ID NO: 60 - protein, 1079 aa, Dinoroseobacter shibae
MRLGLDIGTSSIGWWLYETDGAGSDARITGVVDGGVRIFSDGRDPKSGASLAVDRRAARAMRRRRDRYLRRRATLMKVLAETGLMPADPAEAKALEALDPFALRAAGLDEPLPLPHLGRALFHLNQRRGFKSNRKTDRGDNESGKIKDATARLDMEMMANGARTYGEFLHKRRQKATDPRHVPSVRTRLSIANRGGPDGKEEAGYDFYPDRRHLEEEFHKLWAAQGAHHPELTETLRDLLFEKIFFQRPLKEPEVGLCLFSGHHGVPPKDPRLPKAHPLTQRRVLYETVNQLRVTADGREARPLTREERDQVIHALDNKKPTKSLSSMVLKLPALAKVLKLRDGERFTLETGVRDAIACDPLRASPAHPDRFGPRWSILDADAQWEVISRIRRVQSDAEHAALVDWLTEAHGLDRAHAEATAHAPLPDGYGRLGLTATTRILYQLTADVVTYADAVKACGWHHSDGRTGECFDRLPYYGEVLERHVIPGSYHPDDDDITRFGRITNPTVHIGLNQLRRLVNRIIETHGKPHQIVVELARDLKKSEEQKRADIKRIRDTTEAAKKRSEKLEELEIEDNGRNRMLLRLWEDLNPDDAMRRFCPYTGTRISAAMIFDGSCDVDHILPYSRTLDDSFPNRTLCLREANRQKRNQTPWQAWGDTPHWHAIAANLKNLPENKRWRFAPDAMTRFEGENGFLDRALKDTQYLARISRSYLDTLFTKGGHVWVVPGRFTEMLRRHWGLNSLLSDAGRGAVKAKNRTDHRHHAIDAAVIAATDPGLLNRISRAAGQGEAAGQSAELIARDTPPPWEGFRDDLRVRLDRIIVSHRADHGRIDHAARKQGRDSTAGQLHQETAYSIVDDIHVASRTDLLSLKPAQLLDEPGRSGQVRDPQLRKALRVATGGKTGKDFENALRYFASKPGPYQAIRRVRIIKPLQAQARVPVPAQDPIKAYQGGSNHLFEIWRLPDGEIEAQVITSFEAHTLEGEKRPHPAAKRLLRVHKGDMVALERDGRRVVGHVQKMDIANGLFIVPHNEANADTRNNDKSDPFKWIQIGARPAIASGIRRVSVDEIGRLRDGGTRPI

SEQ ID NO: 61 - protein, 1096 aa, Eubacterium dolichum
MMEVFMGRLVLGLDIGITSVGFGIIDLDESEIVDYGVRLFKEGTAAENETRRTKRGGRRLKRRRVTRREDMLHLLKQAGIISTSFHPLNNPYDVRVKGLNERLNGEELATALLHLCKHRGSSVETIEDDEAKAKEAGETKKVLSMNDQLLKSGKYVCEIQKERLRTNGHIRGHENNFKTRAYVDEAFQILSHQDLSNELKSAIITIISRKRMYYDGPGGPLSPTPYGRYTYFGQKEPIDLIEKMRGKCSLFPNEPRAPKLAYSAELFNLLNDLNNLSIEGEKLTSEQKAMILKIVHEKGKITPKQLAKEVGVSLEQIRGFRIDTKGSPLLSELTGYKMIREVLEKSNDEHLEDHVFYDEIAEILTKTKDIEGRKKQISELSSDLNEESVHQLAGLTKFTAYHSLSFKALRLINEEMLKTELNQMQSITLFGLKQNNELSVKGMKNIQADDTAILSPVAKRAQRETFKVVNRLREIYGEFDSIVVEMAREKNSEEQRKAIRERQKFFEMRNKQVADIIGDDRKINAKLREKLVLYQEQDGKTAYSLEPIDLKLLIDDPNAYEVDHIIPISISLDDSITNKVLVTHRENQEKGNLTPISAFVKGRFTKGSLAQYKAYCLKLKEKNIKTNKGYRKKVEQYLLNENDIYKYDIQKEFINRNLVDTSYASRVVLNTLTTYFKQNEIPTKVFTVKGSLTNAFRRKINLKKDRDEDYGHHAIDALIIASMPKMRLLSTIFSRYKIEDIYDESTGEVFSSGDDSMYYDDRYFAFIASLKAIKVRKFSHKIDTKPNRSVADETIYSTRVIDGKEKVVKKYKDIYDPKFTALAEDILNNAYQEKYLMALHDPQTFDQIVKVVNYYFEEMSKSEKYFTKDKKGRIKISGMNPLSLYRDEHGMLKKYSKKGDGPAITQMKYFDGVLGNHIDISAHYQVRDKKVVLQQISPYRTDFYYSKENGYKFVTIRYKDVRWSEKKKKYVIDQQDYAMKKAEKKIDDTYEFQFSMHRDELIGITKAEGEALIYPDETWHNFNFFFHAGETPEILKFTATNNDKSNKIEVKPIHCYCKMRLMPTISKKIVRIDKYATDVVGNLYKVKKNTLKFEFD

SEQ ID NO: 62 - protein, 1082 aa, Neisseria meningitidis
MAAFKPNPINYILGLDIGIASVGWAMVEIDEDENPICLIDLGVRVFERAEVPKTGDSLAMARRLARSVRRLTRRRAHRLLRARRLLKREGVLQAADFDENGLIKSLPNTPWQLRAAALDRKLTPLEWSAVLLHLIKHRGYLSQRKNEGETADKELGALLKGVADNAHALQTGDFRTPAELALNKFEKESGHIRNQRGDYSHTFSRKDLQAELNLLFEKQKEFGNPHISDGLKEGIETLLMTQRPALSGDAVQKMLGHCTFEPAEPKAAKNTYTAERFIWLTKLNNLRILEQGSERPLTDTERTTLIDEPYRKSKLTYAQARKLLELDNTAFFKGLRYGKDNAEASTLMEMKAYHAISRALEKEGLKDKKSPLNLSPELQDEIGTAFSLFKTDEDITGRLKDRVQPEILEALLKHISFDKFVQISLKALRRIVPLMEQGKRYDEACAEIYGDHYGKKNTEEKIDLPPIPADEIRNPVVLRALSQARKVINGVVRRYGSPARIHIETAREVGKSFKDRKEIEKRQEENRKDREKAATKFREYFPNFVGEPKSKDILKLRLYEQQHGKCLYSGKEINLGRLNEKGYVEIDHALPFSRTWDDSFNNKVLVLGSENQNKGNQTPYEYFNGKDNSREWQEFKARVETSRFPRSKKQRILLQKFDEEGFKERNLNDTRYVNRFLCQFVADHMLLTGKGKRRVFASNGQITNLLRGFWGLRKVRAENDRHHALDAVVVACSTVAMQQKITRFVRYKEMNAFDGKTIDKETGEVLHQKTHFPQPWEFFAQEVMIRVFGKPDGKPEFEEADTPEKLRTLLAEKLSSRPEAVHEYVTPLFVSRAPNRKMSGQGHMETVKSAKRLDEGVSVLRVPLTQLKLKDLEKMVNREREPKLYEALKARLEAHKDDPAKAFAEPFYKYDKAGNRTQQVKAVRVEQVQKTGVWVRNHNGIADNATMVRVDVFEKGDKYYLVPIYSWQVAKGILPDRAVVQGKDEEDWQLIDDSFNFKFSLHPNDLVEVITKKARMFGYFASCHRGTGNINIRIHDLDHKIGKNGILEGIGVKTALSFQKYQIDELGKEIRPCRLKKRPPVR

SEQ ID NO: 63 - protein, 1050 aa, Gluconacetobacter diazotrophicus
MGENMIDESLTFGIDLGIGSCGWAVLRRPSAFGRKGVIEGMGSWCFDVPETSKERTPTNQIRRSNRLLRRVIRRRRNRMAAIRRLLHAAGLLPSTDSDALKRPGHDPWELRARGLDKPLKPVEFAVVLGHIAKRRGFKSAAKRKATNISSDDKKMLTALEATRERLGRYRTVGEMFARDPDFASRRRNREGKYDRTTARDDLEHEVHALFAAQRRLGQGFASPELEEAFTASAFHQRPMQDSERLVGFCPFERTEKRAAKLTPSFERFRLLARLLNLRITTPDGERPLTVDEIALVTRDLGKTAKLSIKRVRTLIGLEDNQRFTTIRPEDEDRDIVARTGGAMTGTATLRKALGEALWTDMQERPEQLDAIVQVLSFFEANETITEKLREIGLTLAVLDVLLTALDAGVFAKFKGAAHISTKAARNLLPHLEQGRRYDEACTMAGYDHAASRLSHHGQIVAKTQFNALVTEIGESIANPIARKALIEGLKQIWAMRNHWGLPGSIHVELARDVGNSIEKRREIEKHIEKNTALRARERREVHDLLDLEDVNGDTLLRYRLWKEQGGKCLYTGKAIHIRQIAATDNSVQVDHILPWSRFGDDSFNNKTLCLASANQQKKRSTPYEWLSGQTGDAWNAFVQRIETNKELRGFKKRNYLLKNAKEAEEKFRSRNLNDTRYAARLFAEAVKLLYAFGERQEKGGNRRVFTRPGALTAALRQAWGVESLKKQDGKRINDDRHHALDALTVAAVDEAEIQRLTKSFHEWEQQGLGRPLRRVEPPWESFRADVEATYPEVFVARPERRRARGEGHAATIRQVKERECTPIVFERKAVSSLKEADLERIKDGERNEAIVEAIRSWIATGRPADAPPRSPRGDIITKIRLATTIKAAVPVRGGTAGRGEMVRADVFSKPNRRGKDEWYLVPVYPHQIMNRKAWPKPPMRSIVANKDEDEWTEVGPEHQFRFSLYPRSNIEIIRPSGEVIEGYFVGLHRNTGALTISAHNDPKSIHSGIGTKTLLAISKYQVDRFGRKSPVRKEVRTWHGEACISPTPPG

SEQ ID NO: 64 - protein, 1391 aa, Kordia algicida
MKKILGLDLGTNSIGWALVNEAEHEHEQSSIVKLGVRVNPLSVDEKTNFEKGRPLSINADRTSKRSARRNLQRFKLRRKNLINLLLKHHIISNETILTEVGKNTTHQTLKLRSKATQEKISLEEFARILLSINKKRGYKSSRKEKNEDEGFTIDGMAIAKELYDNQLTPGQYVYNILQDGKNYIPDFYRSDLQAEFDDVWQFQKKFYSSILTDEFYLKLKGQGKENTRKLFLAIHQVYTAENKGKRDAVKLQYYKWRSEAVKKQLSIEEVAYVLVEINNNINKSSGYLGAISDRSKALYFNNETVGEYLYGQLVKNRHNSLRNQVFYRQDYLDEFEKIWETQAKFYDELTNELKQEIRDVVIFYQRKLKSQKHLISDCLFEKHHKAIPKSSPLFQEFKIWQNLNYLEFVHTQSKEKIFFSELDDETRQFVFAELNIRGTLKIKEIKKLIGLETPVYWKSNFDEIEGNRTNQVLYNVYQNIADDLGYGFDWSKKHAFEINAELQAIFKDVGIDTAILNFDASIEENDFDKQKSYQLWHLLYSAEDTDKATEEDKLIYGNINTKLKKQLHQKYGFEAKYGNLLANISLQQDYGNLSAKAIKKILPYLESGNSFYEACTIVGYNPSNSLTKEQQQNRKLKDKLELLPKNSLRNPVVEKILNQKVNLINQLIDEYGKPDEVRIELARELKKSAKQRADLSKHINDATLKNQNIRKTLQKDFGIQNPSKNDVIRYKLYDELKDNGYKTLFTNKYIPKEQLFSKDVDIEHIIPKAILFDDSFSNKTLAYRNVNLAKADATAFDFISSKHLDDLDNYKARVETLFQSKRISKGKYKKLLMTRQNLPEDFIERDLRNSQYIAKKATAMLKEVFRSVVPTSGRITDKLREDWDLVNVMKELNLPKYRTLGLTEFIERKNGNKIEQIIDWTKRNDHRHHAMDALTVAFTTHNHIQYLNNLNVTHGLNGVDTDHEKSRLYAIKQAITKVYIVGKTKKRKFIPPMENFRSHAKNHLEGILISFKNKNKVVTKNKNRTKTKTKGVFNEKIQLTPRGQLHKETIYGHAKKVIVTKEKVSSKFTHEKILQVTKPAYREALLKRLASFKNDPKKAFSGKNALSKNPLYFDITSGKKVPDTVKLSYFENSYVIRKEVNSDNFKNEKSLQKVLDVGIRRILEKRLADYNGNAKEAFSNLEKNPIWKDKEKGVCIKKVRIEALKNAEPLHVKKDHLGKIILDDENKSTPVDFISTGNNHHVAIYEDKDGKLHDKVVSFYEVVSRVNLGLPIIDKSFNSHLDWKFLFSMKQNEMFVFPSEDFNPKEIDIGNPKNNELISKYLFRVQKFSKVTYGNSAVRDYVFRHHLETELIDKKELKGITYYQLKSIGMLEKLVKVRINHIGKIVHIGEY

SEQ ID NO: 65 - protein, 1116 aa, Clostridium spiroforme
MVEFLLKEMKIMGRLVLGLDIGITSVGYGVIDIDKNEFVDYGVRLFKEGTAINNEERRSKRGARRLKRRKTNRIADMKKLLERNGLIDEQYTALNNPYEIRKKGLKNKLSNYELATAILHITKNRGTCLESNADETQDEESTKNILSKNALELKDKYICEIQLARLEESGKIRGINNNFKTEDYLKELSKILENQDLEKETIDKIKEIVARRRRYDQGPGSEKSPTPYGSYRMENGELVHVNLIDMMRGKCSVFPDQLRAPQQSYSAELFNLLNDLNNLKINGEKLSSTEKQKIIDFVNEKGGITVKQLLKLIDVGITEISGFRIDKNEKPLITEFKGYKKVLKVFKNYNQESLLNDKSIVDTIMDINTKIKSIDERSDQLKQVLPSLDTSIINDLASIKGVSGYHSLSLKALNLINNEMLKTEMNQMQVLHQLDIFDKNRVSLKGQRQIYADDNAILSPVAKRAHRETFKVINKLRSIYGEFDSIVIETTRDKNTQDQKKRIKNNQKNYEERNTEVNNFLKEAGYNPENINAKTKMKIRLYIEQDAKSAYTLQDINLKELIEDEKAYEIDHIIPISISLDDSFNNKVLTTHDENQEKGNLTPISAFLKGKFHNGNLNTYKVFIQNNKNLNRKKKEYLLCEDDITRYEVVQNFINRNLVDTSYACRTVMNTLVHYFKDNEINTKVHTIKGQATSTFRKRIGLIKDREEDYFHHAIDALIVASLKKMNLINSYLMKVDFNEMYDEETGEIFNVLPDNSYLDEKYISFVSNLKNIYEESNKYIRGVMIKEKMTYPLIKVSHKIDTKPNRKISDDTIYSTRNVDNQDMLVERIKNIYDPKENAANTLINDIINDNTDKYIMYHKDPQTFDKIKAIVLNHFNEFKTDKNCYIVTKEGLYKLKGTSPLALYYEEFGPITKYAKKNNGPTIHSMKFYSEKLGNHLSITHKYSTVNKKVITKQISPYRTDFYQSPEGKYKFVTVRYKDVAYNAKKDKYIIDHSWYREQKKLKKIADEWIFVCSVHRDELIGIMKADGQKRIFDSSTESDGETLYHDAKTYEILKFTATNNDITGRFEVKPIYCYCKKQLMVSIGTCRKIQKFATDVLGNLYIVKDNVLKLEFK

SEQ ID NO: 66 - protein, 1348 aa, Finegoldia magna
MKSEKKYYIGLDVGTNSVGWAVTDEFYNILRAKGKDLWGVRLFEKADTAANTRIFRSGRRRNDRKGMRLQILREIFEDEIKKVDKDFYDRLDESKFWAEDKKVSGKYSLFNDKNFSDKQYFEKFPTIFHLRKYLMEEHGKVDIRYYFLAINQMMKRRGHFLIDGQISHVTDDKPLKEQLILLINDLLKIELEEELMDSIFEILADVNEKRTDKKNNLKELIKGQDFNKQEGNILNSIFESIVTGKAKIKNIISDEDILEKIKEDNKEDFVLTGDSYEENLQYFEEVLQENITLFNTLKSTYDFLILQSILKGKSTLSDAQVERYDEHKKDLEILKKVIKKYDEDGKLFKQVFKEDNGNGYVSYIGYYLNKNKKITAKKKISNIEFTKYVKGILEKQCDCEDEDVKYLLGKIEQENFLLKQISSINSVIPHQIHLFELDKILENLAKNYPSFNNKKEEFTKIEKIRKTFTFRIPYYVGPLNDYHKNNGGNAWIFRNKGEKIRPWNFEKIVDLHKSEEEFIKRMLNQCTYLPEETVLPKSSILYSEYMVLNELNNLRINGKPLDTDVKLKLIEELFKKKTKVTLKSIRDYMVRNNFADKEDFDNSEKNLEIASNMKSYIDFNNILEDKFDVEMVEDLIEKITIHTGNKKLLKKYIEETYPDLSSSQIQKIINLKYKDWGRLSRKLLDGIKGTKKETEKTDTVINFLRNSSDNLMQIIGSQNYSFNEYIDKLRKKYIPQEISYEVVENLYVSPSVKKMIWQVIRVTEEITKVMGYDPDKIFIEMAKSEEEKKTTISRKNKLLDLYKAIKKDERDSQYEKLLTGLNKLDDSDLRSRKLYLYYTQMGRDMYTGEKIDLDKLFDSTHYDKDHIIPQSMKKDDSIINNLVLVNKNANQTTKGNIYPVPSSIRNNPKIYNYWKYLMEKEFISKEKYNRLIRNTPLTNEELGGFINRQLVETRQSTKAIKELFEKFYQKSKIIPVKASLASDLRKDMNTLKSREVNDLHHAHDAFLNIVAGDVWNREFTSNPINYVKENREGDKVKYSLSKDFTRPRKSKGKVIWTPEKGRKLIVDTLNKPSVLISNESHVKKGELFNATIAGKKDYKKGKIYLPLKKDDRLQDVSKYGGYKAINGAFFFLVEHTKSKKRIRSIELFPLHLLSKFYEDKNTVLDYAINVLQLQDPKIIIDKINYRTEIIIDNFSYLISTKSNDGSITVKPNEQMYWRVDEISNLKKIENKYKKDAILTEEDRKIMESYIDKIYQQFKAGKYKNRRTTDTIIEKYEIIDLDTLDNKQLYQLLVAFISLSYKTSNNAVDFTVIGLGTECGKPRITNLPDNTYLVYKSITGIYEKRIRIK

SEQ ID NO: 67 - protein, 1129 aa, Streptococcus infantarius
MSNGKILGLDIGVASVGVGIIDSKTGNVIHANSRLFSAANAENNAERRGFRGARRLTRRKKHRVKRVRDLFEKYDISTDFRNLNLNPYELRVKGLTEQLTNEELFAALRTIAKRRGISYLDDAEDDSTGSSDYAKSIDENRRLLKTKTPGQIQLERLEKYGQLRGNFTVYDENGEAHRLINVFSTSDYKNEARKILETQSNYNKQITDEFIEDYIEILTQKRKYYHGPGNEKSRTDYGRFRTDGTTLENIFGILIGKCSFYPEEYRASKASYTAQEFNFLNDLNNLKVPTETGKLSTEQKEYLVDFAKKSKALGASKLLKEIAKIVDCSVDDIKGYRVDNKDKPDLHTFEPYRKLKFNLSSIDIDELSRETLDKLADILTLNTEREGIEDAIKRNLPSQFTEEQISEIVQIRKNQSSAFNKGWHSFSAKLMNELIPELYVTSEEQMTILTRLEKFKVNKKSSKNTKTIDEKEITDEIYNPVVAKSVRQTIKIINAAVKKYGDFDKIVIEMPRDKNAEDEKKFIDKKQKENKKEKDDSLKRAAFLYNGTDNLPDGVFHGNKELKTKIRLWYQQGERCLYSGKLISIHDLVHNSNKFEIDHILPLSLSFDDSLANKVLVYAWTNQEKGQKTPYQVIDSMDTAWSFREMKDYVLKQKGLGKKKCEYLLTTENIDKIEVKKKFIERNLVDTRYASRVVLNSLQTALKELGKDTKVSVVRGQFTSQLRRKWNIDKSRETYHHHAVDALIIAASSQLKLWQKQENPMFESYGENQVVNKETGEILSISDDKYKELVFQPPYQGFVNTISSKGFEDEILFSYQVDSKFNRKVSDATIYSTRKAKLGKDKKDETYVLGKIKDIYSQDGFDTFIKRYKKDKTQFLMYQKDPLTWENVIEVILRDYPSEKLSEDGKKTVKCNPFEEYRRENGLICKYSKKGNGTPIKSLKYYDKKLGNCIDITPEKSKNRVVLRQISPWRADIYFNLETLKYELMGLKYSDLSFEKGTGKYHISQEKYDAIREKEGIGKKSEFKFTLYRNDLILIKDTLNNCERMLRFGSKNDTSKHYVELKPLEKGTFDSEEEILPVLGKVAKSGQFIKGLNKPNISIYKVRTDVLGNKFFIKKEGDKPKLDFKNNNK

SEQ ID NO: 68 - protein, 1065 aa, Clostridium perfringens
MNKDINYALGLDIGITSVGWAVINLDLNRIEDLGVRIFNAAENLKDGSSLALPRRLARGRRRLLRRKAYRVERVRKLILKNNILTKEELEGLFKNKEVIDVWEARVKGLDYKLSREEWAKILINFCKRRGFKSNRKNEAKDKEAGQILSSISYNIEKMKETNSRTIGEYIYNEVKNSEDSYAPLRNKFGEYKMCVSRDVIREEIHTLFEKQRELGNNFASDEIEDKYFEIFNSQRPFSNFEDLEKLVGFCTFERKKHKRAPKHCISSEEFTLYEGINKLSIIKDGEKRKLSEEERTLVVNEAFNKKEIKYTTLRKLLGLSEEELFSTLTYSIDKDISKTENTKFVSLKGYHEIKRAIEKGVSKKAWQDIENNRNLLNDIAYVLTLGKTDDEIEKQLRLRNVPEELFESLLDMSFNKFNNLSIYALEKILPFMKEGYQYNEACEKAGYNFKAIYEGVRTKKLPVIEIDEIVNPVVNRALAQTRKVINSVIDKYGSPVRINIELARDLAKNFKDRKLIEKEQKENRANLDKIRENLRELMDKEPTVVEVLKYRLWEQQRGECAYTQSQIPLERLFSPGYCEIDHIIPFSRSFDDSLSNKILVLGSENQRKGNRTPYEYFGEDSERWNSFEIWVKGSYLNYKKKANLLKKKFSEEEQRDWKARNLQDTKYICRYISNFVNNRLEFKESENKQKVITVNGRATAYLRSRWGLNKVREDGDKHHALDAAVVGVTTQGMVQKISKYSKAHELYTVRKNDEFVDVETGECVDVDEYKEIRKDILPRPWRGFSEELKLRLSDNPLEELKKSPIETYNEEFIKENVKPIFVSRVPFRKISGKLFKETIYSERAFKDGYFVSKKSLVDLKRGDLDNFYNYECDKKLYDAISERMKEFNYNGKKAFESPFRKPTKSGKEGPVVRSVKIKSAVPFKDGIPMNEGLVAKEGMVRIDIYEKEGKYFVVPVYRYQLAKGIVPKRAAIAKKDELKWPIMDQTYNFKFSIYKNDLIEVKYDKKGVYFGYYDGFDRNSASLTIEKHDNSERYRSIGLKVGVLEINKYEVDVLGNYHKVKLGGN

SEQ ID NO: 69 - protein, 1195 aa, Elusimicrobium minutum
MQKNINTKQNHIYIKQAQKIKEKLGDKPYRIGLDLGVGSIGFAIVSMEENDGNVLLPKEIIMVGSRIFKASAGAADRKLSRGQRNNHRHTRERMRYLWKVLAEQKLALPVPADLDRKENSSEGETSAKRFLGDVLQKDIYELRVKSLDERLSLQELGYVLYHIAGHRGSSAIRTFENDSEEAQKENTENKKIAGNIKRLMAKKNYRTYGEYLYKEFFENKEKHKREKISNAANNHKFSPTRDLVIKEAEAILKKQAGKDGFHKELTEEYIEKLTKAIGYESEKLIPESGFCPYLKDEKRLPASHKLNEERRLWETLNNARYSDPIVDIVTGEITGYYEKQFTKEQKQKLFDYLLTGSELTPAQTKKLLGLKNTNFEDIILQGRDKKAQKIKGYKLIKLESMPFWARLSEAQQDSFLYDWNSCPDEKLLTEKLSNEYHLTEEEIDNAFNEIVLSSSYAPLGKSAMLIILEKIKNDLSYTEAVEEALKEGKLTKEKQAIKDRLPYYGAVLQESTQKIIAKGFSPQFKDKGYKTPHTNKYELEYGRIANPVVHQTLNELRKLVNEIIDILGKKPCEIGLETARELKKSAEDRSKLSREQNDNESNRNRIYEIYIRPQQQVIITRRENPRNYILKFELLEEQKSQCPFCGGQISPNDIINNQADIEHLFPIAESEDNGRNNLVISHSACNADKAKRSPWAAFASAAKDSKYDYNRILSNVKENIPHKAWRFNQGAFEKFIENKPMAARFKTDNSYISKVAHKYLACLFEKPNIICVKGSLTAQLRMAWGLQGLMIPFAKQLITEKESESFNKDVNSNKKIRLDNRHHALDAIVIAYASRGYGNLLNKMAGKDYKINYSERNWLSKILLPPNNIVWENIDADLESFESSVKTALKNAFISVKHDHSDNGELVKGTMYKIFYSERGYTLTTYKKLSALKLTDPQKKKTPKDFLETALLKFKGRESEMKNEKIKSAIENNKRLFDVIQDNLEKAKKLLEEENEKSKAEGKKEKNINDASIYQKAISLSGDKYVQLSKKEPGKFFAISKPTPTTTGYGYDTGDSLCVDLYYDNKGKLCGEIIRKIDAQQKNPLKYKEQGFTLFERIYGGDILEVDFDIHSDKNSFRNNTGSAPENRVFIKVGTFTEITNNNIQIWFGNIIKSTGGQDDSFTINSMQQYNPRKLILSSCGFIKYRSPILKNKEG

SEQ ID NO: 70 - protein, 1101 aa, Akkermansia muciniphila
MSRSLTFSFDIGYASIGWAVIASASHDDADPSVCGCGTVLFPKDDCQAFKRREYRRLRRNIRSRRVRIERIGRLLVQAQIITPEMKETSGHPAPFYLASEALKGHRTLAPIELWHVLRWYAHNRGYDNNASWSNSLSEDGGNGEDTERVKHAQDLMDKHGTATMAETICRELKLEEGKADAPMEVSTPAYKNLNTAFPRLIVEKEVRRILELSAPLIPGLTAEIIELIAQHHPLTTEQRGVLLQHGIKLARRYRGSLLFGQLIPRFDNRIISRCPVTWAQVYEAELKKGNSEQSARERAEKLSKVPTANCPEFYEYRMARILCNIRADGEPLSAEIRRELMNQARQEGKLTKASLEKAISSRLGKETETNVSNYFTLHPDSEEALYLNPAVEVLQRSGIGQILSPSVYRIAANRLRRGKSVTPNYLLNLLKSRGESGEALEKKIEKESKKKEADYADTPLKPKYATGRAPYARTVLKKVVEEILDGEDPTRPARGEAHPDGELKAHDGCLYCLLDTDSSVNQHQKERRLDTMTNNHLVRHRMLILDRLLKDLIQDFADGQKDRISRVCVEVGKELTTFSAMDSKKIQRELTLRQKSHTDAVNRLKRKLPGKALSANLIRKCRIAMDMNWTCPFTGATYGDHELENLELEHIVPHSFRQSNALSSLVLTWPGVNRMKGQRTGYDFVEQEQENPVPDKPNLHICSLNNYRELVEKLDDKKGHEDDRRRKKKRKALLMVRGLSHKHQSQNHEAMKEIGMTEGMMTQSSHLMKLACKSIKTSLPDAHIDMIPGAVTAEVRKAWDVFGVFKELCPEAADPDSGKILKENLRSLTHLHHALDACVLGLIPYIIPAHHNGLLRRVLAMRRIPEKLIPQVRPVANQRHYVLNDDGRMMLRDLSASLKENIREQLMEQRVIQHVPADMGGALLKETMQRVLSVDGSGEDAMVSLSKKKDGKKEKNQVKASKLVGVFPEGPSKLKALKAAIEIDGNYGVALDPKPVVIRHIKVFKRIMALKEQNGGKPVRILKKGMLIHLTSSKDPKHAGVWRIESIQDSKGGVKLDLQRAHCAVPKNKTHECNWREVDLISLLKKYQMKRYPTSYTGTPR

SEQ ID NO: 71 - protein, 1187 aa, Bifidobacterium longum
MLSRQLLGASHLARPVSYSYNVQDNDVHCSYGERCFMRGKRYRIGIDVGLNSVGLAAVEVSDENSPVRLLNAQSVIHDGGVDPQKNKEAITRKNMSGVARRTRRMRRRKRERLHKLDMLLGKFGYPVIEPESLDKPFEEWHVRAELATRYIEDDELRRESISIALRHMARHRGWRNPYRQVDSLISDNPYSKQYGELKEKAKAYNDDATAAEEESTPAQLVVAMLDAGYAEAPRLRWRTGSKKPDAEGYLPVRLMQEDNANELKQIFRVQRVPADEWKPLFRSVFYAVSPKGSAEQRVGQDPLAPEQARALKASLAFQEYRIANVITNLRIKDASAELRKLTVDEKQSIYDQLVSPSSEDITWSDLCDFLGFKRSQLKGVGSLTEDGEERISSRPPRLTSVQRIYESDNKIRKPLVAWWKSASDNEHEAMIRLLSNTVDIDKVREDVAYASAIEFIDGLDDDALTKLDSVDLPSGRAAYSVETLQKLTRQMLTTDDDLHEARKTLFNVTDSWRPPADPIGEPLGNPSVDRVLKNVNRYLMNCQQRWGNPVSVNIEHVRSSFSSVAFARKDKREYEKNNEKRSIFRSSLSEQLRADEQMEKVRESDLRRLEAIQRQNGQCLYCGRTITFRTCEMDHIVPRKGVGSTNTRTNFAAVCAECNRMKSNTPFAIWARSEDAQTRGVSLAEAKKRVTMFTFNPKSYAPREVKAFKQAVIARLQQTEDDAAIDNRSIESVAWMADELHRRIDWYFNAKQYVNSASIDDAEAETMKTTVSVFQGRVTASARRAAGIEGKIHFIGQQSKTRLDRRHHAVDASVIAMMNTAAAQTLMERESLRESQRLIGLMPGERSWKEYPYEGTSRYESFHLWLDNMDVLLELLNDALDNDRIAVMQSQRYVLGNSIAHDATIHPLEKVPLGSAMSADLIRRASTPALWCALTRLPDYDEKEGLPEDSHREIRVHDTRYSADDEMGFFASQAAQIAVQEGSADIGSAIHHARVYRCWKTNAKGVRKYFYGMIRVFQTDLLRACHDDLFTVPLPPQSISMRYGEPRVVQALQSGNAQYLGSLVVGDEIEMDFSSLDVDGQIGEYLQFFSQFSGGNLAWKHWVVDGFFNQTQLRIRPRYLAAEGLAKAFSDDVVPDGVQKIVTKQGWLPPVNTASKTAVRIVRRNAFGEPRLSSAHHMPCSWQWRHE

SEQ ID NO: 72 - protein, 166 aa, uncultured Termite
MNKVQEIEYKKIREKLADREYRIGLDLGVGSIGYVVVSLKECNDLSYLPEDIILSGSRIFKSSIGAVERREFRLQRNSHRHHRERMRFLWQLLAEKQLALQSSKDLEKKENSADCETSQKRFPINILKEDPYILRYKALEEKLSLFQLGYVLYHIANHSNTAYENT

SEQ ID NO: 73 - protein, 1032 aa, uncultured Termite
MLYHIANHRGTDSVRSFLEYDDDKIKENTLTAKIAKETKKVIDAKKYRTFGEYLYKGKIEKFQQNIRKKVSNRKTPANKNKEFAVTRDVIIKETEKILASQKQYYTYILTDEYIKKIKDAISYQTEKLIPESGYCPYFKDEKRLPRSHKLNEYRRMYEALNNAKYFDPVLDENTGEILSYQEKEFSREEKKILFDEVLLKGMELTESGAKKLLYHLPDGCEVQLQGRDKTTQKIKGYALVDLEASPFWLRLSQQQQDEFLYDWNSLPLEKLKPKLTNYYSLTESEVDETFQEIKLPSNYASVGKKAMEILLTYIKDGCSYTEALEKAVSEGKLKVDKQTMIYDSLPYYGKILKESTQKLIGKAFSKQFADRNYKEPDTNKNEREFGKIANPVVHQTLNELRKLINEIITVFGKKPLEIGLETTRELKKSKKNREYLSKQQNKNEYARNRIYKEYIEPHLSQIKSRQENPSKYISKFELLEEQNFICPFCSEKITPDDIINSKVDVEHIFPIEESEDITKNNLVIAHNECNADKGKKSPFDAFGDKTSGKYRWNCILHNAQKNLPHKVWRFYQGSLEKFLENKPMSRRFGTDNSYISKIAARYLACLFNDPYHSEIFCIKSSLIAQLRIAWDLNSIMVPLVKNILSEKELEEFKISKNKKIRIDNRHHALDAIVIAYANRGYHNFLNRIHAKEYKINYREKSWLSKILLPPLNRDLEDFKISVKDSIEKANVSIKHDHNTNGSLVKATAYKVYYSGAGEYIITTSKNVEEISFKEKEDPKDTLYRALCKFECRDIDIKDEKLIKKLKYNSTLYKKVQNNLSKAKQELEQDNKKTEEEGKKSQKITEVRIYKKACSLVKGQYIQCGSRLKDKFFAVKEPTEIKTGLGYDTGDNLFLDLYYDKTGKLCGEIIRKVNFNRNKPNYQKEGYTLFERIYQSDILEVDTSEDRISLKNKTGSAPSDRTFIKVNTFTEVNAYFDGKRDKIQIFFGNLLKSSFKNDSFFISSMQKYNVRKVILTSLGIIKYRSQILKNKEV

SEQ ID NO: 74 - protein, 1032 aa, uncultured Termite
MKKRILGLDIGIASVGWALVEFDDEFQDNKKKGTIIKSGVRIFTRAETPKERESLAKPRREARSQRRRIRRRVERLNSIRELFVKNGVVEEWSVSKKNPNNIYITLNQIKTPWQLRMESLDRKLTNEQFAVVLTHLAKHRGYKSLRKDDKAGKVLEAISQNKKRLNDSDYRTLGEMFCKNESYKEHKRNKGGEYINSVARELIEEEVEKIFVKQREKGNNFADVNTEREYLKIAFSQKPAGSISKMVGFCTFENGEKRAPRDSYSAELFKVLCTINNTTFTDMKTGEIRSFSKEEIGKTLETVKNVKDVKYAKIRKDLGLEDSVKFSGVDYRENAKSKGEGEIFVSMKTYHEIKSKIEKLSKEKWDNLKGNTELLDSIVNIIANLKDDESIKKEFQKLKIDEDIIDVLLNFEFKKFINLSFKALRKIIPFQFQGQKYITASTSAGYSLKQEGIKNKLVPPAKENINVAVVARAFAQTRKVINAVIRKYGQFDQINIELATELKNSKFDRSKIEEGQKKFQSQKDKIFKEVQELRGGMTPSSSLLLKYRLWREQDERCVYSGRKISFEDLLDTGFLDIDHIIPYSKSMDDSFNNKVLCLAEENRNKKNDIPFNYYQRIDRDWNLLISIITSMKNMKIAKKSRLLKQELSDIEGFIERNINDTRYATRYIKDFLENNLEFKENEFIKVKVQARSGGLTSVLSYNWGMSKDREESYFHHAKDAIIVACSTQGMVQYISKISQQYENDKDKMKKIKDKTENCIPKPWDSFRADVEESIEGIFVSFAPRHKVTGSAHKETIYSKKHLEKERYVTVKKSLDKIKLSDLENIPCNENCGIIRVLKERLEKFKNDSLKAFADPVHMPTKCPNKKGPVIRSVKIKESNKTGIEVRKGLAERGEMVRVDVFIKDKKYYLVPIYVSDFKNKDLPNKAIAALKLENEWIMIDKTYSFKFSLFKDDLIKIKKKKEEIFGYFGGVHRSTGTIKIKSRHKPKEIDEGIGSRCLLDFRKFQVDVLGNYTEVKHEKRMPAYITRKDKKH

SEQ ID NO: 75 - protein, 1361 aa, Lactobacillus casei
MTKLGKPYGIGVDIGSNSIGFAAVDENSHLIRLKGKTVIGARLFEEGKAAADRRASRTTRRRLSRNRWRLSFLRDFFESHITPTGPNFFMRQKYSEISPKDKARYKYEKRLFNDRTDAEFYQQYPTMYHLRNRLLTDPSKADVREIYFAIHHILKSRGHFLTSGYAKDFNTNKVALNEIFPALQDAYAQVYPDLDITFDENKVNEFKTVLLNEKATPSDTQRALVNLLLAEDGDKDILKQQKQVLTEFAKAVVGLKTKLNVALGTEVDSSEATVWNFSLGQLDDKWAGIESAMTDEGTEILDQIRDLYRARLLNGIVPAGKTLSQAKVDDYAQHHEDLELFKDYLKQLEDDGTAKAIRQLYDRYIDGDDAKPFVREDFVKALTKEVTAHPNAKSPELLERLAQPDFMLKQRNKANGAIPVQMQQRELDQIIKNQSVYYDWLAAPNPVEKHRKSMPYQLDELLNFRIPYYVGPLVTAKEQKAAQGGVFAWMVRKDPDGNITPYNFDEKVDREASANTFIQRMKTTDTYLIGEDVLPKQSLLYQRYEVLNELNNVRVNNEKLSIEQKQQVIRELFERHNSVTIKQFAENLRAHGDYAHIPEIRGLADEKRFLSSLSTYRQLKSLLPDAIDDPAKQADIENIIAWSTVFEDAAIFKTKLKEINWLDSQTITKLSNIRYRGWGQFSHKFLNGLTLGNGHTIIQELFLSNNNLMQILTDETLQKKMTELNADKLKAANINDAIDDAYTSPSNKKALRQVLRVIEDIKRAADGQDPSWLYVETADGGGTPGKRTRARQHQLQEIYANAAHELIDSAVRGELEDKIADKADFNDRLVLYFMQGGRDIYTGTPLNIDQLSSYDIDHILPQSLIKDNSLDNRVLVHAIINREKNATFASTIYAQKMNATWRQWHEAGLISGRKLRNLQMRPDQIDKYASGFVARQLVETRQIIKLTEQIVAAQYPETKIIAVKAGLSHQLREELEFPKNRDVNHYHHAFDAFLAARIGTYLLKRFPNLQAFFTYGKFKKADVKKLRGFNFIRDITHAEDKIVVKDTGEVIWDKKRDVDELDRIYNFKRMLITHEVHFEKADLFKQTVYGAKDSKEAGGKKQLISKKKGYPVDIYGGYTQETGSYLSVVRLTKKAMYAVVKVSTRDAAKLAVAKSISEQKENETLNDIIDEKLSKISKNGKITHELFEVVLPRVGQKTLFKNSKYNLFLVNSDTYMHNYQELWMPREYQKMWKDISLSKYGDAQTEDQLDQIFGFIVSQVNSYFNLYDINQFRKKLNDAADKFATLPMRDTDDMQGKIATIGQLLIGLQANAARSDLRNLDIKTPLGLLQIPNGISLDSDTSVVYQSPTGLLEREVHLSDL

SEQ ID NO: 76 - protein, 1348 aa, Streptococcus equi
MKKPYTIALDIGTNSVGWVVVTDDYRVPTKKMKVLGNTERKTIKKNLIGALLFDSGDTAEGTRLKRTARRRYTRRKNRLRYLKEIFTEEMAKVDDGFFQRLEDSFYVLEDKEGNKHPIFANLADEVAYHKKYPTIYHLRKELVDNPQKADLRLIYLAVAHIIKFRGHFLIEGTLSSKNNNLQKSFDHLVDTYNLLFEEQRLLTEGINAKELLSAALSKSKRLENLISLIPGQKKTGIFGNIIALSLGLTPNFKANFGLSKDVKLQLAKDTYADDLDSLLAQIGDQYADLFLAAKNLSDAILLSDILTESDEITRAPLSASMVKRYREHHKDLVTLKTLIKDQLPEKYQEIFLDKTKNGYAGYIEGQVSQEEFYKYLKPILARLDGSEPLLLKIDREDFLRKQRTFDNGSIPHQIHLEELHAILRRQEVFYPFLKDNRKKIESLLTFRIPYYVGPLARGHSRFAWVKRKFDGAIRPWNFEEIVDEEASAQIFIEKMTKNDLYLPNEKVLPKHSLLYETFTVYNELTKVKYATEGMTRPQFLSADQKQAIVDLLFKTNRKVTVKQLKENYFKKIECWDSVEITGVEDSFNASLGTYHDLLKIIQDKDFLDNPDNQKIIEDIILTLTLFEDKKMISKRLDQYAHLFDKVVLNKLERHHYTGWGRLSGKLINGIRDKQSGKTILDFLKADGFANRNFMQLIHDSELSFIDEIAKAQVIGKTEYSKDLVGNLAGSPAIKKGISQTIKIVDELVKIMGYLPQQIVIEMARENQTTAQGIKNARQRMRKLEETAKKLGSNILKEHPVDNSQLQNDKRYLYYLQNGKDMYTGDDLDIDYLSSYDIDHIIPQSFIKNNSIDNKVLTSQGANRGKLDNVPSEAIVRKMKGYWQSLLRAGAISKQKFDNLTKAERGGLTQVDKAGFIQRQLVETRQITKHVAQILDSRFNTEFDDHNKRIRKVHIITLKSKLVSDFRKEFGLYKIRDINHYHHAHDAYLNAVVAKAILGKYPQLAPEFVYGDYPKYNSFKERQKATQKMLFYSNILKFFKDQESLHVNSDGEEIWNANKHLPIIKNVLSIPQVNIVKKTEVQTGGFYKESILSKGNSDKLIPRKNNWDTRKYGGFDSPTVAYSVLVIAKMEKGKAKVLKPVKEMVGITIMERTAFEENPVVFLEARGYREIQEHLIIKLPKYSLFELENGRRRLLASASELQKGNELFLPVDYMTFLYLAAHYHELTGSSEDVLRKKYFVDRHLHYFDDIIQMINDFAERHILASSNLEKINHTYHNNSDLPVNERAENIINVFTFVALGAPAAFKFFDATIDRKRYTSTKEVLNATLIHQSVTGLYETRIDLSQLGEN

SEQ ID NO: 77 - protein, 1341 aa, Ruminococcus lactaris
MGKGYYVGLDMGTGSVGWAVTDESYQILRRHGKAMWGVRLFESAKTAEERRMFRTGRRRLDRRGWRIEILQEIFAEEISRVDPGFFLRMKESKYYPEDKRDIQGNCPELPYTLFVDKTFTDKDFHKKYPTIYHLRKMLMETEDTPDMRLVYLALHHMMKHRGHFLLSGDISQVTEFKNTFNQFIENIRNEEMDFEIELDESAVQMIEETLKDKNLTRSAKKSKLVKGLNAKNVRDKAFLTLLSGGTVKLSDLFGMEELNEGERPKISFADNGYEEYAAVVEMELGELYYIVESAKAVYDWAILSDILGGSTSVSDAKVRAYEKHKADLKYLKAVVKEYFPKEVYNAVFVESSDKLNNYPAYIGMTKKNGKKVSLEGKRCSREEFMDFLKKNIVVKLPDEEAKMYLQSELEKDSFLPKQVNKDNGVIPYQVHKYELKKILDNLGDKIPFLKENAEKIEKLFSFRIPYYVGPLRTGNGENSKFAWAERKSTEKIYPWNFENVIDVEQSAENFIRRMTNKCTYLIGEDVLPKDSLLYSKFMVLNELNNLRLDGQKISVELKQKIYRDVFCRSRKVTQKKLKSYLIREGIAGKNVELTGIDGDFKGSLTAYHDFKEKLIDVELTQKEKEEIILNIVLFGDDKKLLKQRLKKKFPQLTEKQINTVTALSYKGWGRLSKKLLEEVTVPAPETGEVWNIITALWETNDNFMQLLSKEYQFSDRIEEFNEEKADPEVSYQTIEDLYVSPAVKRQIWQTLQIIQEIEKVMGEKPKRVFVEMAREKQENKRTESRKKTLSDLYTKCKKEEPEWIEALCTSLEKHEEHQLRSDKLYLYYTQKGRCMYSGEPIDLEDLWDNTKYDIDHIYPQSKTMDDSLKNRVLVKKEYNAKKSDTYPIAADIQKKMMPFWKSLLTGGFIPKEKYDRLVRNNPLDANELAGFIERQIVETRQSTKAVAEILKKILPDTEIVYVKAKTVSKFRQDFDFIKVRDMNDLHHAKDAYLNIVVGNVYFVKFTKNAAWFVKENPGRTYNLEKMFIWDVARDGEIAWKAGKSGSIVQVRAMMEKNHILVTRRSYEVKGGLFDQQILKKGKGQVPVKESDERLRDIGKYGGYNKAAGVYFMLVSSKDKKGKEQRTIEFVPIYLKDRVEKDMESARNYLMEERGLREPKILIKKIKIDTLFKVDGFYMWLSGRTSNQLIFKGANQLILSKEDMKTLKKVVKYIQRQKEDKNVKISMRDGITEEELLKLYETFLDKIRHSIYGARLSSQEKTLVNGKEKFIDLSVEAKCQVLYEILHLFQCQSGAANLKMIGGPASAGILVMNNNISKCKNISIVNQSPTGIYEKEIDLLRV

SEQ ID NO: 78 - protein, 1003 aa, Gluconacetobacter diazotrophicus
MIDESLTFGIDLGIGSCGWAVLRRPSAFGRKGVIEGMGSWCFDVPETSKERTPTNQIRRSNRLLRRVIRRRRNRMAAIRRLLHAAGLLPSTDSDALKRPGHDPWELRARGLDKPLKPVEFAVVLGHIAKRRGFKSAAKRKATNISSDDKKMLTALEATRERLGRYRTVGEMFARDPDFASRRRNREGKYDRTTARDDLEHEVHALFAAQRRLGQGFASPELEEAFTASAFHQRPMQDSERLVGFCPFERTEKRAAKLTPSFERFRLLARLLNLRITTPDGERPLTVDEIALVTRDLGKTAKLSIKRVRTLIGLEDNQRFTTIRPEDEDRDIVARTGGAMTGTATLRKALGEALWTDMQERPEQLDAIVQVLSFFEANETITEKLREIGLTLAVLDVLLTALDAGVFAKFKGAAHISTKAARNLLPHLEQGRRYDEACTMAGYDHAASRLSHHGQIVAKTQFNALVTEIGESIANPIARKALIEGLKQIWAMRNHWGLPGSIHVELARDVGNSIEKRREIEKHIEKNTALRARERREVHDLLDLEDVNGDTLLRYRLWKEQGGKCLYTGKAIHIRQIAATDNSVQVDHILPWSRFGDDSFNNKTLCLASANQQKKRSTPYEWLSGQTGDAWNAFVQRIETNKELRGFKKRNYLLKNAKEAEEKFRSRNLNDTRYAARLFAEAVKLLYAFGERQEKGGNRRVFTRPGALTAALRQAWGVESLKKQDGKRINDDRHHALDALTVAAVDEAEIQRLTKSFHEWEQQGLGRPLRRVEPPWESFRADVEATYPEVFVARPERRRARGEGHAATIRQVKERECTPIVFERKAVSSLKEADLERIKDGERNEAIVEAIRSWIATGRPADAPPRSPRGDIITKIRLATTIKAAVPVRGGTAGRGEMVRADVFSKPNRRGKDEWYLVPVYPHQIMNRKAWPKPPMRSIVANKDEDEWTEVGPEHQFRFSLYPRSNIEIIRPSGEVIEGYFVGLHRNTGALIPTPVGPDSYVIA

SEQ ID NO: 79 - protein, 1368 aa, Streptococcus pyogenes
MDKKYSIGLDIGTNSVGWAVITDDYKVPSKKFKVLGNTDRHSIKKNLIGALLFDSGETAEATRLKRTARRRYTRRKNRICYLQEIFSNEIAKVDDSFFHRLEESFLVEEDKKHERHPIFGNIVDEVAYHEKYPTIYHLRKKLADSTDKADLRLIYLALAHMIKFRGHFLIEGDLNPDNSDVDKLFIQLVQTYNQLFEENPINASRVDAKAILSARLSKSRRLENLIAQLPGEKRNGLFGNLIALSLGLTPNFKSNFDLAEDAKLQLSKDTYDDDLDNLLAQIGDQYADLFLAAKNLSDAILLSDILRVNTEITKAPLSASMIKRYDEHHQDLTLLKALVRQQLPEKYKEIFFDQSKNGYAGYIDGGASQEEFYKFIKPILEKMDGTEELLAKLNREDLLRKQRTFDNGSIPHQIHLGELHAILRRQEDFYPFLKDNREKIEKILTFRIPYYVGPLARGNSRFAWMTRKSEETITPWNFEEVVDKGASAQSFIERMTNFDKNLPNEKVLPKHSLLYEYFTVYNELTKVKYVTEGMRKPAFLSGEQKKAIVDLLFKTNRKVTVKQLKEDYFKKIECFDSVEISGVEDRFNASLGTYHDLLKIIKDKDFLDNEENEDILEDIVLTLTLFEDREMIEERLKTYAHLFDDKVMKQLKRRRYTGWGRLSRKLINGIRDKQSGKTILDFLKSDGFANRNFMQLIHDDSLTFKEDLQKAQVSGQGDSLHEHIANLAGSPAIKKGILQTVKVVDELVKVMGRHKPENIVIEMARENQTTQKGQKNSRERMKRIEEGIKELGSDILKEYPVETTQLQNEKLYLYYLQNGRDMYVDQELDINRLSDYDVDHIVPQSFLKDDSIDNKVLTRSDKNRGKSDNVPSEEVVKKMKNYWKQLLNAKLITQRKFDNLTKAERGGLSELDKAGFIKRQLVETRQITKHVAQILDSRMNTKYDENDKLIREVRVITLKSKLVSDFRKDFQFYKVREINNYHHAHDAYLNAVVGTALIKKYPKLESEFVYGDYKVYDIRKMIAKSEQEIGKATAKYFFYSNIMNFFKTEITLANGEIRKRPLIETNGETGEIVWDKGRDFATVRKVLSMPQVNIVKKTEVQTGGFSKESILPKRNSDKLIARKKDWDPKKYGGFDSPTVAYSVLVVAKVEKGKSKKLKSVKELVGITIMERSSFEKDPVDFLEAKGYKEVRKDLIIKLPKYSLFELENGRKRMLASAGELQKGNELALPSKYVNFLYLASHYEKLKGSPEDNEQKQLFVEQHKHYLDEIIEQISEFSKRVILADANLDKVLSAYNKHRDKPIREQAENIIHLFTLTNLGAPAAFKCFDTTIGRNRYKSIKEVLDATLIHQSITGLYETRIDLSQLGGD

SEQ ID NO: 80 - protein, 1504 aa, Bacteroides dorei
MKNIVGLDLGTNSIGWAVVNGSVNDDGSEQLVKIQASGSRIIPMDAAMIGDFNKGNSISQTAERTRLRGVRRLSERYLLRRERLHRILDILGFLPFHFAQDLDRHGKIVKGKEPKLAWRKNEAGQFEFIFQDSFKEMLEDFKLNYPNLITDDKKVPYDWTIYYLRKKGLTSKISKEELAWILLNFNQKRGYYQLRGEEEEENKDKLVEFYALKVVAVEDSGEKKGKDIWYNVHLENGWVYRRTSNMSLDWVGKTKEFIVTTDLEKDGTPKKDKEGNVKRSFRAPKEDDWSLVKKKTEADIDQTHKTVGAYIYDTLLGNPSQKIRGRLVRTIERKYYKEELKLILEKQKEFHLELQDRALYAACIEELYPINEAHRNNVGNRDFTYLFLEDILFYQRPLKSKKSLIDNCPYEENQGLDKETGEIKSFPVKCIAKSHPLFQEFRLWQFIINLRIYRKDLAQDVDVTNELLKTEEDYVALFDWLNGKKEIDQKAFLKYPVFGLKKEIENYRWNYVQDKPYPCNETRSLMLARLEKCDISIEFLTKENEEALWHILYSVEDKNEIVKALQKFADKHDLNASFVDVFQKFPPFKKEYGSYSAKAIKKLLPLMRMGKYWSENSIDKGTRERIDKIITGEYDEKIENRVREKAIHLADVSDFKGLPLWLVCYIVYGRHSEAKEIIQWKSPADIDSYLRSFKQHSLRNPIVEQIIIETLRVVRDIWKQVGNIDEIHVELGREMKNPADKRKKMTQQMSENENTNLRIKYLLTEFLNPEYEVENVRPYSPSQQDILRIYEEGVLNSVSDLPEEISDILKKFTETDLKKRPSRSEVLRYKLWLEQKYRSPYTGEVIPLGKLFTPAYEIEHVIPQSYYFDDSFSNKVICEAEVNKLKSNLLGHEFIVKHHGEIVELPFGKKVRIFTVDEYEQFVKDNYSRTRSKMKKLLMDDIPEEFVTRQLNDSRYISKVVKSLLSNIVREKGEEEAISKNVIPCTGGVTDRLKKDWGINEVWNKIILPRFQRLNELTGTNKFTTKNVGIQEIPTMPLELQKGFNKKRIDHRHHAMDAIIIACANRNIINYLNNKSATAKAELSRYDLQKMLCDKAKTDNNGNYKWVIRKPWASFTQDTYLALENIIVSFKQNLRVINKATNRFLHYNEEGKKIFVKQGKGDNWAIRKSMHKDTVFGEVNLRRIKTVALNEAMKNPQSIVVKDFKRKLLELWNLGFDAKRIKKYFEDNRETWSDINLSKIEVYYFSKDTKDRFFATRKPLDTSFDRKKIENNITDTGIQKILLRHLELKDNNPDIAFSPDGIDEMNRNIIQLNNGKYHQPIIKIRWYEQADKFAVGQTGNKSSKFVEAAKGTNLFFAVYESNILDKKTNTIIKKRNYATIPLNVAIERQKQGLPVAPEDENGNDPIFVLSPNDLVYLPTDDELANGIIAQPLDRGRIYKMVSSSGEQCFFIKHIVANVLVDKFEFSPLNKMERALTGEMIKMICIPIKVDRLGNVLESSSSYKK

SEQ ID NO: 81 - protein, 1426 aa, Capnocytophaga sputigena
MKNILGLDLGITSISFAHIVEDENKEKSEIKELGVRIVSLTTDEQSDFEKGKSITTNANRTLKHGARLNLDRYQQRRKYLIDLLQKANLITSSSILAENGKNTTHSTWQLRAKAVTERIEKEEFARVLLAINKKRGYKSSRKAKTEDEGQAIDGMAIAKRLYDENLTPGQLSLQLLQQNKKLLPDFYRSDLQREFDLVWNFQKQFYPDILTDSFYKELQGKGKDATSKAFSKRYHFDTAENKGSKESVRLQAYQWRAEAISKQLSKEEVAYVLTEINNNLNNASGYLGAISDRSKELYFNRQTVGQYLYAQLQENRHNSLKNKVFYRQDYLDEFERIWETQASFHKELTDELKKQIRDVVIFYQRKLKSQKGLISFCEFESKEIEIEKDGKTITKTIGARVVPKSSPLFQEFKIWQILNNVTCKRKGIRKKKSSAKSTELDLFNEPSQTIFSLDMECKQLLFDELNLKGDLKSDKVLKLLGYSPQEWEINYNQLEGNRTQKALYEAYLKIVEMEAHDVKDILQIKSAKDDWSLDESPLSASEIKEKVKDIFQALGICTKILYFDPLLPVKEFEKQDSYQLWHLLYSYESDDSTSGNETLYRILEKKYAFKREHARILANVALQDDYGSLSTKAIRKIYPNIKENQYSKACELAGYKHSKLSLTTEELEARELKNIIPLLKKNALRNPVVEKILNQMINVVNALIEKNSERDAEGKITKYFHFDEIRIELARELKKNAQKRYEMTQNINKAKLEHQKISEILQKKFGIKNPTKSDIIRYRLYQELEHNGYKELYTNAPIARDMLFSKNIEIEHIVPKARVFDDSFSNKTLTFHRINSNKGEYTAFDYITSLNSEEELNQYLTRVENAYKTKSISLTKYKNLLKKASEIGDGFINRDLRDTQYIAKKAKEILFQVTKNVLSTSGSITDRLREDWGLVDVMKELNMPKYQSLGLTEVEERKEGNKVTVIKNWTKRNDHRHHAMDALTVAFTKPSYIQYLNHLNARKDENNKNYSVILAIEEKETIKVPTNNGKNKRVFIEPIPNFRQVAKKHLEEIFISHKAKNKVVTKNVNKPAGTDKQQITLTPRGQLHKETIYGKYQYYVNKEEKVGVKFDERTITKVSNPLYREALLKRLQANDNDPKKAFTGKNALSKNPIYLDETKTKTLPEKVNLTYLEEDFSIRKDISPDNFKDLKSIEKVIDQGVKRILIKRLQDYDNDPKKAFVDLEKNPIWLNKEKGIAIKRVTISGVSNAQPLHIGKDHLGKTTLNKEGNEIPVDYVSTGNNHHVAIYRDKEGNLQEQIVSFFEAVVRTQQGLPIIDKTYKQEEGWQFLFTMKQNEMFVFPNATTGFNPAEIDLLDPKNKKLISPNLFRVQKIATKDYFFRHHLETNVETDNVLKNTTWKREGLSGLKDIVKVRINHLGDIVSIGEY

SEQ ID NO: 82 - protein, 1443 aa, Parabacteroides johnsonii
MIKLLYLEKLKQYTMKKILGLDLGTSSIGWALVNEAENSDEVSSIIKLGVRVNPLTVDEMQNFEKGKSITTNADRTLKRSMRRNLQRYKLRRDALIELLKKVGFITDKTILSEQGNRTTFETYRLRAKAAEEEISLKELARVLLMINKKRGYKSSRKAKGEEEGALIDGMEIAKKLYDEDLTPGQLCLQLLESGKKFFPDFYRSDLQEEFNKIWDFQKQFNLFSFCDVAKEEVKGKNKSQTWAILAKYFVETKKVNVWNEHEAQTENREEVYKLVGLKRTVKGEELKKENYRWRVQALTEQLDLEKIAVVLQEINGQISASSGYLGAISDRSKVLYFNRQTVGQYQMAELNKNPNMSLRNMVFYRQDYLDEFNVIWEKQAEFHKELTPELKKEIRDIIIFYQRRLKSQKGLISFCEFENREVVVEKEGKKQTKIIGCKVIPRSHPLFQEFKIWQTLNNIEVFVGEKKGKRKKSNVSSDLFGDTEDALITEGRRFLYQEEKKILAKELSIKKGLTKAEILRLLFENPQELDINFKQIDGNQTGFALFSAYSNMIEKYGYEPLDFKKPAEDLISQLKTVFTDLGWNTDLLFIDLDKENKEWEKQPYFRLWHLLYSFEGDNTPTGNGKLIEKIMQLCGIEKEYAIELANVSLQDDYGSLSAKAIKKILLYLKEGNQYDMACEYAGYRHSKSSLTKEEIENKVLKDKLEILPKNSLRNPVVEKILNQMVNVINTVMEVYGRPDEIRVELARELKKSAKEREELTKAVAKNTREHEEIRKVLQSEFGMINVSRNDIIRYKLYEELKDNGYKTLYSNQYIPREKLFSKEIDIEHIIPQSRLFDDSLSNKTLEYKSINIEKGNKTAYDFVKEKYGEEGLQQYLNRCENLCKDKKAKLRKLKMELNEIPDGFIDRDLRNTQYIAKKALSMLTEICRRVVATTGSITDKLREDWQLVDVMKELNLPKYEALGLVEVYEDKDGRKIKRIKDWTKRNDHRHHAMDALTVAFTKDVFIQYFNNKNAAWESDSKEHTNIVGIKTRYFESGKAVPPIPLGQFRVEAKCHLENLLVSIKAKNKVVTTNVNCIKKKGGTYKNTQQTPRGQLHLETIYGSHNQYVTKIEKVNASFDAVKIATVSKQDYRNALLKRLEVFGNDPKKAFTGKNSLEKNPIYLDRAQTIQVPDKVQTVELETAYTIRKPVDPTLNVDKVVDKKIRLILEQRLKEYGGDAKKAFVNLDENPIWLNEEKGISIKRVTIRGISKAQALHDKKDKDGNFILDETGKRIPVDFVNTGNNHHVAIYRKPVLDKKGQVIFDDEGNPMYELDEDVVPFFEAVTRANLGIPIIDKDYKKSEGWQFLFSMKQNEYFVFPNEKTGFNPKEVDLLDPDNYAMISPNLFRVQKIGLNDYTFRHHLETTIQNDLKFITWIRCGKSGIKDIVKVRINHIGQIVSVGEY

SEQ ID NO: 83 - protein, 984 aa, Campylobacter jejuni
MARILAFDIGISSIGWAFSENDELKDCGVRIFTKVENPKTGESLALPRRLARSARKRLARRKARLNHLKHLIANEFKLNYEDYQSFDESLAKAYKGSLISPYELRFRALNELLSKQDFARVILHIAKRRGYDDIKNSDDKEKGAILKAIKQNEEKLANYQSVGEYLYKEYFQKFKENSKEFTNVRNKKESYERCIAQSFLKDELKLIFKKQREFGFSFSKKFEEEVLSVAFYKRALKDFSHLVGNCSFFTDEKRAPKNSPLAFMFVALTRIINLLNNLKNTEGILYTKDDLNALLNEVLKNGTLTYKQTKKLLGLSDDYEFKGEKGTYFIEFKKYKEFIKALGEHNLSQDDLNEIAKDITLIKDEIKLKKALAKYDLNQNQIDSLSKLEFKDHLNISFKALKLVTPLMLEGKKYDEACNELNLKVAINEDKKDFLPAFNETYYKDEVTNPVVLRAIKEYRKVLNALLKKYGKVHKINIELAREVGKNHSQRAKIEKEQNENYKAKKDAELECEKLGLKINSKNILKLRLFKEQKEFCAYSGEKIKISDLQDEKMLEIDHIYPYSRSFDDSYMNKVLVFTKQNQEKLNQTPFEAFGNDSAKWQKIEVLAKNLPTKKQKRILDKNYKDKEQKNFKDRNLNDTRYIARLVLNYTKDYLDFLPLSDDENTKLNDTQKGSKVHVEAKSGMLTSALRHTWGFSAKDRNNHLHHAIDAVIIAYANNSIVKAFSDFKKEQESNSAELYAKKISELDYKNKRKFFEPFSGFRQKVLDKIDEIFVSKPERKKPSGALHEETFRKEEEFYQSYGGKEGVLKALELGKIRKVNGKIVKNGDMFRVDIFKHKKTNKFYAVPIYTMDFALKVLPNKAVARSKKGEIKDWILMDENYEFCFSLYKDSLILIQTKDMQEPEFVYYNAFTSSTVSLIVSKHDNKFETLSKNQKILFKNANEKEVIAKSIGIQNLKVFEKYIVSALGEVTKAEFRQREDFKK

SEQ ID NO: 84 - protein, 1082 aa, Neisseria meningitidis
MAAFKPNPINYILGLDIGIASVGWAMVEIDEDENPICLIDLGVRVFERAEVPKTGDSLAMARRLARSVRRLTRRRAHRLLRARRLLKREGVLQAADFDENGLIKSLPNTPWQLRAAALDRKLTPLEWSAVLLHLIKHRGYLSQRKNEGETADKELGALLKGVADNAHALQTGDFRTPAELALNKFEKESGHIRNQRGDYSHTFSRKDLQAELILLFEKQKEFGNPHVSGGLKEGIETLLMTQRPALSGDAVQKMLGHCTFEPAEPKAAKNTYTAERFIWLTKLNNLRILEQGSERPLTDTERATLMDEPYRKSKLTYAQARKLLGLEDTAFFKGLRYGKDNAEASTLMEMKAYHAISRALEKEGLKDKKSPLNLSPELQDEIGTAFSLFKTDEDITGRLKDRIQPEILEALLKHISFDKFVQISLKALRRIVPLMEQGKRYDEACAEIYGDHYGKKNTEEKIYLPPIPADEIRNPVVLRALSQARKVINGVVRRYGSPARIHIETAREVGKSFKDRKEIEKRQEENRKDREKAAAKFREYFPNFVGEPKSKDILKLRLYEQQHGKCLYSGKEINLGRLNEKGYVEIDHALPFSRTWDDSFNNKVLVLGSENQNKGNQTPYEYFNGKDNSREWQEFKARVETSRFPRSKKQRILLQKFDEDGFKERNLNDTRYVNRFLCQFVADRMRLTGKGKKRVFASNGQITNLLRGFWGLRKVRAENDRHHALDAVVVACSTVAMQQKITRFVRYKEMNAFDGKTIDKETGEVLHQKTHFPQPWEFFAQEVMIRVFGKPDGKPEFEEADTPEKLRTLLAEKLSSRPEAVHEYVTPLFVSRAPNRKMSGQGHMETVKSAKRLDEGVSVLRVPLTQLKLKDLEKMVNREREPKLYEALKARLEAHKDDPAKAFAEPFYKYDKAGNRTQQVKAVRVEQVQKTGVWVRNHNGIADNATMVRVDVFEKGDKYYLVPIYSWQVAKGILPDRAVVQGKDEEDWQLIDDSFNFKFSLHPNDLVEVITKKARMFGYFASCHRGTGNINIRIHDLDHKIGKNGILEGIGVKTALSFQKYQIDELGKEIRPCRLKKRPPVR

SEQ ID NO: 85 - protein, 1021 aa, Clostridium cellulolyticum
MKYTLGLDVGIASVGWAVIDKDNNKIIDLGVRCFDKAEESKTGESLATARRIARGMRRRISRRSQRLRLVKKLFVQYEIIKDSSEFNRIFDTSRDGWKDPWELRYNALSRILKPYELVQVLTHITKRRGFKSNRKEDLSTTKEGVVITSIKNNSEMLRTKNYRTIGEMIFMETPENSNKRNKVDEYIHTIAREDLLNEIKYIFSIQRKLGSPFVTEKLEHDFLNIWEFQRPFASGDSILSKVGKCTLLKEELRAPTSCYTSEYFGLLQSINNLVLVEDNNTLTLNNDQRAKIIEYAHFKNEIKYSEIRKLLDIEPEILFKAHNLTHKNPSGNNESKKFYEMKSYHKLKSTLPTDIWGKLHSNKESLDNLFYCLTVYKNDNEIKDYLQANNLDYLIEYIAKLPTFNKFKHLSLVAMKRIIPFMEKGYKYSDACNMAELDFTGSSKLEKCNKLTVEPIIENVTNPVVIRALTQARKVINAIIQKYGLPYMVNIELAREAGMTRQDRDNLKKEHENNRKAREKISDLIRQNGRVASGLDILKWRLWEDQGGRCAYSGKPIPVCDLLNDSLTQIDHIYPYSRSMDDSYMNKVLVLTDENQNKRSYTPYEVWGSTEKWEDFEARIYSMHLPQSKEKRLLNRNFITKDLDSFISRNLNDTRYISRFLKNYIESYLQFSNDSPKSCVVCVNGQCTAQLRSRWGLNKNREESDLHHALDAAVIACADRKIIKEITNYYNERENHNYKVKYPLPWHSFRQDLMETLAGVFISRAPRRKITGPAHDETIRSPKHFNKGLTSVKIPLTTVTLEKLETMVKNTKGGISDKAVYNVLKNRLIEHNNKPLKAFAEKIYKPLKNGTNGAIIRSIRVETPSYTGVFRNEGKGISDNSLMVRVDVFKKKDKYYLVPIYVAHMIKKELPSKAIVPLKPESQWELIDSTHEFLFSLYQNDYLVIKTKKGITEGYYRSCHRGTGSLSLMPHFANNKNVKIDIGVRTAISIEKYNVDILGNKSIVKGEPRRGMEKYNSFKSN

SEQ ID NO: 86 - protein, 1131 aa, Acidovorax ebreus
MAQHVFGLDIGIASVGWAILGEQRIIDLGVRCFDKAETAKEGDPLNLTRRQARLLRRRLYRRAWRLTQLSRLLKRKGLIADAKLFAKAPSYGDSAWELRRQGLDRLLTPLEWARVIYHQCKHRGFHWTSKAEEAKADSDAEGGRVKQGLAHTKALMQAKNYRSAAEMVLAEFPDAQRNKRGQYDKALSRVLLGEELALLFATQRRLGNPHASDFFEKLILGDGDRKSGLFWQQKPALSGADLLKMLGKCTFEKGEYRAPKASFSVERHVWLTRLNNLRIVVDGRSRPLNEAERQAALLLPYQTETSKYKTLKNAFIKAGLWGDGVRFGGLAYPSQAQIDAEKTKDPEDQFLVKLPAWHELRKAFKAAGHEALWQQISTPALDGDPTLLDQIATVLSVYKDGAEVVQQLRQLALPEPAASIAVLEKISFDKFSSLSLKALRRIVPLMQSGLRYDEAVAQIPEYGHHSQRIEPGAAKHLYLPPFYEAQRKYAGKGDHIGSMQFRDDADIPRNPVVLRALNQARKVVNALIREYGSPIAVNIEMARDLSRPLDERNKVKRAQEEFRDRNDRARSEFERDFGYKPKAAAFEKWMLYREQLGQCAYSQQPLDIQRVLDDHNYAQVDHALPYSRSYDDSKNNKVLVLTHENQNKGNRTAFEYLTSFPDGEDGERWRTFVAWVQGNKAYRMAKRNRLLRKNYGVDESKGFIDRNLNDTRYICKFFKNYVEEHLQLAARADGDTARRCVVVNGQLTAFLRARWGLTKVRGDSDRHHALDAAVVAACTHGMVKALADYSRRKEISFLQEGFPDPETGEILNPAAFDRARQHFPEPWTHFAHELKARLFTDDLAALREDMQRLGSYTTEDLGRLRTLFVSRAPQRRSGGAVHKETIYAQPESLKQQGGVIEKILLTSLKLQDFDKLLNPESNDHFVEPHRNERLYAAIRQRLEQFGGRADKAFGPDNLFHKPDKNNQPTGPVVRSIKLVRGKQTGIPIRGGLAKNDSMLRVDIFTKAGKFHLVPVYVHHRVTGLPNRAIVAFKDEDEWTLIDESFAFLFSVYPNDYVKVTLKKEQQSGYYSGADRSTGAMNLWAHDRAASVGKDGLIRGIGVKTALSVEKFNVDVLGRIYLAPPETRSGLA

SEQ ID NO: 87 - protein, 1122 aa, Streptococcus suis
MSNGKILGLDIGIASVGVGVIDAQTGEIIHASSRIFPSANAANNAERRTFRGSRRLIRRKKHRIKRLDDLFNDFHINLDGEMSTDNPYVLRVKGLSQKLTVEELYISIKNIMKRRGISYLDDAESDNEAGRSDYAKAIERNRQLLTSKTPGEIQLERLEKYGQLRGNFTIIDEEGQSQQIINVFSTSDYVKEVEKILDCQKMYHKFISDEFCDKLIELLREKRKYYVGPGNEKSRTDYGIYRTDGTTLENLFGILIGKCTFYPDQYRSSRASYTAQEFNFLNDLNNLTVPTETKKLSQEQKEFLVNYAKETSVLGAGKILQQIAKLADCKVEDIRGYRLDNKDKPELHTFETYRAMKGLVPLVDIGVLSREQLDILADILTLNTDFEGIREALKKQLPNVFDEKQVKGLASFRKSKSQLFAKGWHNLSQKIMLEVIPELYATSDEQMTILTRLGKFEKSSVAEYPSSINVDEITDEIYNPVVAKSIRQTIKIINASIKKWGEFDQIVIEMPRDRNEDEEKKRIADGQKANAKEKADSILRAAELYCAGKVLPDYVYNGHNQLATKIRLWYQQGERCIYTGQPISIHDLIHNQNQYEIDHILPLSLTFDDSLSNKVLVLATANQEKAQRTPYNYLKSATSAWSYREFKDYVTKRKGIGKKKCEYLTFEEDINGFEVRSKFIQRNLVDTRYASKVILNALQDYFKISGIQTKVSVVRGQFTSQLRHKWGIEKTRETYHHHAVDALIIAASSQLRLWKKQESPLVVDYQEGRQVDLETGEILELTDEQYKELVYQPPYQGFVNTISSSAFDNEILFSYQVDSKVNRKISDATIYATRNAQLGKDKTEGIYVLGKIKDIYTQAGYEAFLKRYTKDKTSFLMYHKDLDTWEKVIEIILRDYREYDEKGKEIGNPFERYRRENGYVKKYSRKGNGTAIKSLKYYDNKLGNHIDITPENSRNAVVLQSLKPWRTDVYFNKETGKYEFLGIKYSDLSFEKGTGEYGISQEKYDSIKIAEGVAKKSIFKFTLYKQDLLFIKDIENNFGKLLRFTSKNDTSKHYVELKPYDKNKFGTEEPLLPVLGNVAKSGQCIKGLNKSNISIYKVRTDILGYRHFIKQEGEHPQLKFKK

SEQ ID NO: 88 - protein, 1509 aa, Bacteroides coprophilus
MKKTLGLDLGTNSIGWAVINSNIDSEGKEKLVGISSCGSRIIPMDATTLGDFGKGNTKSPVAERTRLRGIRRLLERSLLRRERLHRVLSVMGFLPEHYASQLDRYGKFLPETEPKLAWYKDDSGRYQFLFQKSFHEMLEDFRQHQPELVAGEKKIPYDWTIYYLRKKALSQEITKEELAWILLNFNQKRGYYQLRGEEEQEENNKSVEYHALKVVSVEDSGERKGKDIWYNVTLENGWVYRRASNIPLDWTGKVKEFVVTTELDDAGNPKKDKEGNVKRSFRAPKEDDWGLLKTRTQAQIDESGKTVGTYIYESLLCMPNQKIRGKLVRTIERKYYKDELRQILVKQSEFHAALQDHNLLLSCIEELYPNNEAHRRLLSASSFIYFLIEDILFYQRPLKSQKGLIDNCPYESHIYKDKKDGSLHHVPLKCVSKSHPLFQEFRLWQFLSNLRIYQRERMMDGSLKLDVDVTREFLPSEEDYVKLFDWLNERKEISQKFLLAYKPFGLKKNEQANYRWNYVEDKSYPCNETRAEIKSRLSKAGVPEEFLTEEKEEALWHILYSISDKKELTKALGTFAAKNCLNESFVEVFAKIPPFESNYAAYSLKAIRKLLALMRMGKYWNEQAIDRQTRDRIEKILTGEYDETIRSRVREKAMLLTDISSFRGLPLWLACYIVYDRHSESKELVKWETPADIDHFLSKFKQNSLRNPIVEQVITESLRTVRDIWKQEGKIDEIHVELGREMKNPAKERARITAQVQENENTNLRIKALLAEFMNPEFEIENVHPYSPGQQEILRIYEDGVLSGIAEKDLPDDITAILKKFRENDVKKRPTTSEVLRYKLWLEQRYRSPYTGRVIPLGKLFTPAYEIEHVIPQSRYFDDSISNKVICESAVNKLKDNCLGYEFIKKHSGEMVELGNGETVPVFSVEEYERFVKESYFGNSKKMKKLLLEDIPDSFIERQLNDSRYISRVVTSLLSNLVCEEGEQDGLSKNVIVCTGGITDRLKKDWGVQEVWNRIILPRFLRLNEITGRTDFTSTSVNGHLLPALPLYLQKGFNKKRIDHRHHAMDAIVIACANRNIVNYLNNSSARKNSEISRYDLQRLLCEKVKTDANGNYKWILRKPWETFTQDVYAALTNIVVSFKQNLRVINRTTNYYQHYNEAGEKRMIPQTKGDRWAIRKPMHKDTVYGEVNLRKEKTLPLRDVVKNPSIVVDKSLKNKLYELLKSQYDLKAIAKYFETHQDVWADVNLKKIKVYYFTKETNERFFATRKSLDPSFDQKKIEEEVTDTGVQKILLHHLQQNNNDPDMAFSPDGIDRMNQNMTILNDGKWHQPIYKVRTYEKADKFAVGESGNKAKKFVEAAKGTNLFFAVYESVQEDEAIGKQVCKRTFATIPLNEVIKRKKQGLPAAPEDLNGNLPKFVLSPNDLVYLPTEEERNSSRIIQPLDRERIYKMVSSSGSQCFFIKVFVANSIWDKNEYSSLNKMERAITNEMIKEICVPIKIDRLGNVSLIQI

SEQ ID NO: 89 - protein, 1219 aa, Bacteroides cellulosilyticus
MKEEVRGKNRSQTWAILAKFFVWSEKESVWNEKEARTEERVKEYKLVGLKRDTKGNELKLENYRWRVQALSEQLNPEIVAIVLQEINGQISASSGYLGAISDRSKQLYFNRQTVGQYLMSELEKDPNVSLRNRVFYRQDYLDEFDRIWEKQAEFHEELTVELKKEIRDIIIFYQRRLKSQKGLISFCEFEKREVVVEEDGRKKNKTVGCRVIPRSHPLFQEFKIWQTLNDIEVFAWDKQSKRKKADKSSILFDNSEDALLVEGKRFLYQEEKELLAKELFVKESMKKAEVLKLLFENYQELDLNFKQIDGNHTGFALFSAYSKMIEKYGYEPVDFKRSADEIIEKLETIFTNLGWNTELLSIDLSKEDKELERQSYFRLWHLLYSFEGDNTPTGNGKLLEKIMQLCDVEKEYAVELANVSFQEDYGSLSAKAIKKILPYLKEGNQYDVACDYAGYRHSRSSLTKDEIENKILKDKLEILPKNSLRNPVVEKILNQMVNLINTLIDTYGKPDEIRVELARELKKNAKEREELTKSIARNTREHDEIRQLLRTEFGMMNVSRNDIIRYKLYEELKDNGYKTLYSNEYIPREKIFSKEIDIEHVIPQARLFDDSLSNKTLEYRAINIEKGNKTAYDFVKEKYGNDGLEKFLNRCETLFKDKRTKLRKLKMEEKDIPEGFIDRDLRNTQYISKKAFAMLNEISRRVVATTGSITDKLREDWQLVDLMKELNLPKYEKLGMVEMFEDKDGRKIKKITDWTKRNDHRHHAVDALTVAFTKDVFIQFYNNKNAAWMPASKEHANITGIKARYFENGKALAPMPLAQFRAEAKRHLENLLVSIKAKNKVITSNVNRTKNKNGENRKLQQTPRGQLHLETVYGSHRQYATKIEKVNAAFDVTKIATVSKLAYRNALLKRLEAFGNDPKKAFTGKNTLEKNPLYLDENQTEMVPEKVQTVEFETVYTIRKPIDPNLSIDKVVDVKIRSVLEKRLKEYGGDAKKAFVNLDENPIWLNEAKGISIKRVSIRGISNAQSLHEKKDKDGNLILGKEGRKIPVDFVNTGNNHHVAIYKKPVLDKVGQVVLDEEGNPKYELDEVVVSFFDAVTRANLGQPIIDKDYRRSEGWQFLFSMKQNEYFVFPNDKTGFNPKEVDLLNPENYALISPNLFRVQKFAYKNYVFRHHLETTIKDTSSTLKGITWTDFRSSKGLDKIVKVRVDHIGQIVSIGEY

SEQ ID NO: 90 - protein, 1329 aa, Catenibacterium mitsuokai
IVDYCIGLDLGTGSVGWAVVDMNHRLMKRNGKHLWGSRLFSNAETAANRRASRSIRRRYNKRRERIRLLRAILQDMVLEKDPTFFIRLEHTSFLDEEDKAKYLGTDYKDNYNLFIDEDFNDYTYYHKYPTIYHLRKALCESTEKADPRLIYLALHHIVKYRGNFLYEGQKFNMDASNIEDKLSDIFTQFTSFNNIPYEDDEKKNLEILEILKKPLSKKAKVDEVMTLIAPEKDYKSAFKELVTGIAGNKMNVTKMILCEPIKQGDSEIKLKFSDSNYDDQFSEVEKDLGEYVEFVDALHNVYSWVELQTIMGATHTDNASISEAMVSRYNKHHDDLKLLKDCIKNNVPNKYFDMFRNDSEKSKGYYNYINRPSKAPVDEFYKYVKKCIEKVDTPEAKQILNDIELENFLLKQNSRTNGSVPYQMQLDEMIKIIDNQAEYYPILKEKREQLLSILTFRIPYYFGPLNETSEHAWIKRLEGKENQRILPWNYQDIVDVDATAEGFIKRMRSYCTYFPDEEVLPKNSLIVSKYEVYNELNKIRVDDKLLEVDVKNDIYNELFMKNKTVTEKKLKNWLVNNQCCSKDAEIKGFQKENQFSTSLTPWIDFTNIFGKIDQSNFDLIENIIYDLTVFEDKKIMKRRLKKKYALPDDKVKQILKLKYKDWSRLSKKLLDGIVADNRFGSSVTVLDVLEMSRLNLMEIINDKDLGYAQMIEEATSCPEDGKFTYEEVERLAGSPALKRGIWQSLQIVEEITKVMKCRPKYIYIEFERSEEAKERTESKIKKLENVYKDLDEQTKKEYKSVLEELKGFDNTKKISSDSLFLYFTQLGKCMYSGKKLDIDSLDKYQIDHIVPQSLVKDDSFDNRVLVVPSENQRKLDDLVVPFDIRDKMYRFWKLLFDHELISPKKFYSLIKTEYTERDEERFINRQLVETRQITKNVTQIIEDHYSTTKVAAIRANLSHEFRVKNHIYKNRDINDYHHAHDAYIVALIGGFMRDRYPNMHDSKAVYSEYMKMFRKNKNDQKRWKDGFVINSMNYPYEVDGKLIWNPDLINEIKKCFYYKDCYCTTKLDQKSGQLFNLTVLSNDAHADKGVTKAVVPVNKNRSDVHKYGGFSGLQYTIVAIEGQKKKGKKTELVKKISGVPLHLKAASINEKINYIEEKEGLSDVRIIKDNIPVNQMIEMDGGEYLLTSPTEYVNARQLVLNEKQCALIADIYNAIYKQDYDNLDDILMIQLYIELTNKMKVLYPAYRGIAEKFESMNENYVVISKEEKANIIKQMLIVMHRGPQNGNIVYDDFKISDRIGRLKTKNHNLNNIVFISQSPTGIYTKKYKL

SEQ ID NO: 91 - protein, 1152 aa, Roseburia inulinivorans
MNAEHGKEGLLIMEENFQYRIGLDIGITSVGWAVLQNNSQDEPVRITDLGVRIFDVAENPKNGDALAAPRRDARTTRRRLRRRRHRLERIKFLLQENGLIEMDSFMERYYKGNLPDVYQLRYEGLDRKLKDEELAQVLIHIAKHRGFRSTRKAETKEKEGGAVLKATTENQKIMQEKGYRTVGEMLYLDEAFHTECLWNEKGYVLTPRNRPDDYKHTILRSMLVEEVHAIFAAQRAHGNQKATEGLEEAYVEIMTSQRSFDMGPGLQPDGKPSPYAMEGFGDRVGKCTFEKDEYRAPKATYTAELFVALQKINHTKLIDEFGTGRFFSEEERKTIIGLLLSSKELKYGTIRKKLNIDPSLKFNSLNYSAKKEGETEEERVLDTEKAKFASMFWTYEYSKCLKDRTEEMPVGEKADLFDRIGEILTAYKNDDSRSSRLKELGLSGEEIDGLLDLSPAKYQRVSLKAMRKMQPYLEDGLIYDKACEAAGYDFRALNDGNKKHLLKGEEINAIVNDITNPVVKRSVSQTIKVINAIIQKYGSPQAVNIELAREMSKNFQDRTNLEKEMKKRQQENERAKQQIIELGKQNPTGQDILKYRLWNDQGGYCLYSGKKIPLEELFDGGYDIDHILPYSITFDDSYRNKVLVTAQENRQKGNRTPYEYFGADEKRWEDYEASVRLLVRDYKKQQKLLKKNFTEEERKEFKERNLNDTKYITRVVYNMIRQNLELEPFNHPEKKKQVWAVNGAVTSYLRKRWGLMQKDRSTDRHHAMDAVVIACCTDGMIHKISRYMQGRELAYSRNFKFPDEETGEILNRDNFTREQWDEKFGVKVPLPWNSFRDELDIRLLNEDPKNFLLTHADVQRELDYPGWMYGEEESPIEEGRYINYIRPLFVSRMPNHKVTGSAHDATIRSARDYETRGVVITKVPLTDLKLNKDNEIEGYYDKDSDRLLYQALVRQLLLHGNDGKKAFAEDFHKPKADGTEGPVVRKVKIEKKQTSGVMVRGGTGIAANGEMVRIDVFRENGKYYFVPVYTADVVRKVLPNRAATHTKPYSEWRVMDDANFVFSLYSRDLIHVKSKKDIKTNLVNGGLLLQKEIFAYYTGADIATASIAGFANDSNFKFRGLGIQSLEIFEKCQVDILGNISVVRHENRQEFH

SEQ ID NO: 92 - protein, 686 aa, Coprococcus comes
MKKQDSPKNNMGYTAYNLNVLGYEEFAKRVELLFKDTDAVKRLNDSHMQMAEGFDLNALPGSPALRRGVSQAIKVLDDIVSVAGKAPDRIYLKVTRTASNSRKGKRTAKRSDKIKQALKALDADAAADLGAAKLLRELGMFDEKEINERIYLYFHQAGKCLYTGKPIDITRIASNDYYVDHVVPLAYRKDESLDNKVLVYAEASRYKSETLLVSPAVQRKMLPFWRMLRNAGLMSERKLNALIRTEISEGMLKSIIGRQFTENSWEAKLFTAAIAAKYPGTVVIPVKAGVIGAVRSRIGIPKSLKANQFYHAHDALLAAEVGRYMELAKPAFVHNRVKYEQYMRKIKLVNEENKKAPKSQLDFFAGGFFFDRVDKDTGEVYWNKDEEVERIYRACGWKNLRVTYAAFEDGGAFWKQTIYSPREKSKLIATKSDRPAEIYGGYSSQTFANFFVYEVMKKKVKQLRFGAVPAAIASKSDPDTYNAMLEMYARGLAKTAKEKFVRIVRARVLKNTMIELYGERFRIAGEKQVYPVRQMPLAIDEVYLLKGVETIAAAGNAGASAKIDFEKAAESLVGFWDLLLEKLPVNYPKLTVQLKLGLLKHPKDILAATSESEFPAIVYKIAEAEIQVMEQASGLRNMSDTKILGGNTFGGSLVFTFNKVLNDPKSKACFIDTTPAGLYEVKTKIW

SEQ ID NO: 93 - protein, 1105 aa, Actinomyces coleocanis
MDNKNYRIGIDVGLNSIGFCAVEVDQHDTPLGFLNLSVYRHDAGIDPNGKKTNTTRLAMSGVARRTRRLFRKRKRRLAALDRFIEAQGWTLPDHADYKDPYTPWLVRAELAQTPIRDENDLHEKLAIAVRHIARHRGWRSPWVPVRSLHVEQPPSDQYLALKERVEAKTLLQMPEGATPAEMVVALDLSVDVNLRPKNREKTDTRPENKKPGFLGGKLMQSDNANELRKIAKIQGLDDALLRELIELVFAADSPKGASGELVGYDVLPGQHGKRRAEKAHPAFQRYRIASIVSNLRIRHLGSGADERLDVETQKRVFEYLLNAKPTADITWSDVAEEIGVERNLLMGTATQTADGERASAKPPVDVTNVAFATCKIKPLKEWWLNADYEARCVMVSALSHAEKLTEGTAAEVEVAEFLQNLSDEDNEKLDSFSLPIGRAAYSVDSLERLTKRMIENGEDLFEARVNEFGVSEDWRPPAEPIGARVGNPAVDRVLKAVNRYLMAAEAEWGAPLSVNIEHVREGFISKRQAVEIDRENQKRYQRNQAVRSQIADHINATSGVRGSDVTRYLAIQRQNGECLYCGTAITFVNSEMDHIVPRAGLGSTNTRDNLVATCERCNKSKSNKPFAVWAAECGIPGVSVAEALKRVDFWIADGFASSKEHRELQKGVKDRLKRKVSDPEIDNRSMESVAWMARELAHRVQYYFDEKHTGTKVRVFRGSLTSAARKASGFESRVNFIGGNGKTRLDRRHHAMDAATVAMLRNSVAKTLVLRGNIRASERAIGAAETWKSFRGENVADRQIFESWSENMRVLVEKFNLALYNDEVSIFSSLRLQLGNGKAHDDTITKLQMHKVGDAWSLTEIDRASTPALWCALTRQPDFTWKDGLPANEDRTIIVNGTHYGPLDKVGIFGKAAASLLVRGGSVDIGSAIHHARIYRIAGKKPTYGMVRVFAPDLLRYRNEDLFNVELPPQSVSMRYAEPKVREAIREGKAEYLGWLVVGDELLLDLSSETSGQIAELQQDFPGTTHWTVAGFFSPSRLRLRPVYLAQEGLGEDVSEGSKSIIAGQGWRPAVNKVFGSAMPEVIRRDGLGRKRRFSYSGLPVSWQG

SEQ ID NO: 94 - protein, 1361 aa, Anaerococcus tetradius
MGNYYLGLDIGTNSVGWAVTDENYNIERFKKKNMWGIRLFDEAKTAESRRIHRQARRMRQRKIQRLNLLMELFDVEISKVDESFFIRKKESDLHYEDKSQDSRYALFNDKEFNDKDYHNKYPTIFHLIMDLIENDEKKDIRLLYLACHYLIKNRGHFIFEGQKFDVNSSLNNNINKLKSHLDQFYNICLDFDNDKLIEILVNQNLNISEKSKKIKELLRKTNLEVGIANLIAGGSIKLSNMFDDDELKNLDYNSLSFKNSNFDEGRELFEEVLEDRFELVEILKDIHDASVLETMLSSASISPDGGKYISSSMINSYNKHKRDLKLLKKIIKKYKKSEYDNIFRDENIKNNYLSYTRTGINKNKKVQAEDNTDSDGFYKYIVKILKDIKENDSDEDIKYILSEIDKKNFVPKQRTKENSVIPYQLREIELRKIIDNQSKYHKFLNEVDEKGISVKEKIISLLTFRIPYYIGPLNPSYNEEKNFTTSWVKRLAKGKVTPWNFEDMVDIDASREAFIENKLNKCSFLLDETVLPKDSLLYQEYMVLNELNNLKINGQSINTDLKKSIYEELFKKYKKVTRKRLISYIKEKENMSGDIVITGIDGDFKQGLKSYIAFKDIIGEKIDDDIYRKEVEKIIRDISLYGDDKSFIQKKIKNENKLDLSDDQISKIAKLKFKDWGRFSKKLLVGIKASDKNTGEIDNIIGFMRNYNYNIMQLMANVFTFKDEIEKLNSKYYTDEKINIDYLDDLYLSSPAKRMLWQSFQIVDEIKNIKNSDPKKIFIEMARSKEDKPTRKMSRKSRLEKLYTDSKKQFIKLFGPDEYDKLNNEIKNKSESDFRWDNLYLYYTQFGRCMYSLDPIDLEELSNKNLYDQDHIYPKSKIYDDSIENRVLVKKQLNLDKSNEYPIPDRVLNKDKNKLLAFWKMLNEKELIGDKKYARLIRKSPFTDEELGDFIARQLVETRQATKETANMLKRLCPDSKIVYVKAKNVSDFRRKFDILKCRSINDLHHAHDAYLNIVVGNVFDTKFTSNPLNFIKNNSKNRSYNLEKIYDYDVIRNEKIAWLAERKEENQDGSIATVLKNLSKNDIRVTRRTYIKCEDLFDENIVRKGNGKFPIKENNNKSDTNKYGGYSGIKNAYFVLLEDEKHNRILEAIPSFIYKKEKNGEKGSVINYLQNILGIKSAKILRDKIKIGSLLKIDKFPYNLAGKSGNGILISGGVQLILDKNTSKYIKKIENYKYKLDENKDYQINIFDKLSKEENIKLFDLFVDKFENSIYKNRVNIKLKEIKLARPKFEHLSIEEQIKTLTQMLILFGRENNAVNLEYIGLPKNTGKTKINKKINNKDIKIINQSITGLYETEEDLANI

SEQ ID NO: 95 - protein, 1377 aa, Lactobacillus brevis
MESNHDGEQVKYTLGLDIGTSSIGYAAIDKHQKPIRAKGKHVIGVRLFQEGQTAADRRAFRTTRRRLKRRKWRLNLLNRLFDPYLSEVDPNFLPRLRQSNLSPKDDNKHFNGSTLFPDKTDAAFYRQYPTMYHLRYALMTEKRKFDIREVYLAIHHIVKYRGNFLNSATVDSFKTSNIDFTSQFDRLNELYRQVILDEPFQINMDQVDEMTNKLLDNDALKLDTQKQVAKLLPVIYNDKPIDKQYTRIATEFSKAILGYKTKLDVILNLDTQNAKDWVIRLDDEDIDDKLPALVENLDESRQEIVTIIRDLYAQITLNAIVPKGKSLSESMVDKYNDHKDHLDLLMGLIHELGDDSAKGIKLREAYTQYVGKSDDKTLNQDDFYAAIKKNLDEDSKRSPKIQRLIEQASFMPKQRTSANGVIPHQLHQLELDRIIENQGRYYPFLKKPNPNTHKPNGGKYKLDELVAFRIPYYVGPLITKRDQEKTSGADFAWMIRKPGQEGEITPWNFDQKVDRMASANRFIRRMTTKDSYLVAEDVLPDASLIYEKFKALNELNMLKVNDSRLSPSQKQDLFNNLFKKQKTIRTKKLQTYIRTNWELPSVMISGLADPDKFNSSLSTYIDFRDIFGEKVDDPNRQADYEEIIEWSTVFEDRKIYQAKLNQLDWLTEPQRKALLTKRYTGWGRLSKKLLTGLKDQNGDSILDQLWKTNDNFMQIQSRDEFAKQIHDENAKQFHEANNVDDILDDAFTSPQNKKAIRQVDKVVQDVVKAVGYAPDKIAIEFTRSLENNPQRTVSRQRQLQAAYKNIPREIMKSGLMAELGSVADSKKVLSDKLYLYFTQMGKDMYEDKTINIDNLPNYDIDHILPQAFIKDDSIDNRVLISKEENARKSNRVPLKFFGAKRMGFWKDLLNNGLISNRKFQNLTTDPEKISKYSAKGFIHRQLVETSQVIRLVANILGNEYSQAGTTIIEVSAKMNRQLREDFHLIKNRNVNDYHHAMDAYLTAYVGDYLYLRYPKLRPYFVYGDFKKAEDQDLNIRNFNFLHDLKDNESLDKIVDSETGEIVWEKHGSVKQLKKVYHYKFMLVSQEVYTRQDALFNQTIYPASDADKRKLIPIKNSKPVDVYGGYSGNIDAYMAIVRVHGKKEDNYKVVGIPMRAVTKLKKAEKEGHDSYLNAVHEVLKPQFTKKKKNRKTGEITETVDEFDVLLGKVYYRQLIVDGNKKFMLGSSSYQYNAKQLVLSDKAMQVLSKNGKVKSQDENQNLIDVYDEILEKVDQYFELYDQRHYRESLHKGRGIFVNLPLSNQYDGSKLTSYGKYETIDAILNGLHANATMSNLRYLGISSPFGKMQASNGLTIDPDSIICYQSPTGLFERQIKLSDL

SEQ ID NO: 96 - protein, 1239 aa, Lactobacillus buchneri
MTEKRKFDIREVYLAIHHIVKYRGNFLNSATVDSFKTSNIDFTSQFDRLNELYRQVILEEPFQINMNQVDKMTNKLLDNDALKLDTQKQVAKLLPVIYNDKPVDKQYTRLATEFSKAILGYKTKLDVILNLDTQNAKDWAIRLDDEDIDDKLPALVENLDESRQEIVTIIRDLYAQITLNAIVPKGKSLSESMVDKYNDHKDHLDLLMGLIHELGDDSAKGIKLREAYTQYVGKSGDKTLNQDDFYAAIKKNLDEDSKRSPKIQRLIEQASFMPKQRTSANGVIPHQLHQLELDRIIENQGRYYPFLKEPNSNTHKPNGGKYKLDELVAFRIPYYVGPLITKQDQEKTSGADFAWMIRKPGQGGEITPWNFDQEVDRMASANTFIRRMTTKDSYLVAEDVLPDSSLIYEKFKVLNELNMLKVNDRRLSISQKQDLFNNLFKKQKTIRTKKLQTYIRTKWELPSVMISGLSDPDKFNSSLATYIDFRDVFGEKVDDPNRQADYEKIIEWSTVFEDRKIYQAKLNQLDWLTESQSKALLTKHYTGWGRLSKKLLTGLKDQNGDSILDQLWKTNDNFMQIQSRDEFAKQIHDENAKQFHEANNVDDILDDAFTSPQNKKAIRQVDKVVQDVVKAVGYAPDKIAIEFTRSPQDRPQRTFSRQRQLQSTYLNVAKALMKSNLNQELKSVIDSQQTLTDKLYLYFTQLGQDMYTGKEINFDELVNYQIDHILPQAFIKDDSLDNRVLVSAPINNAKSDNVPVKKFGAKMGYFWKQLAENHLISKRKLNNLTTDPDKIGKFTAQGFIHRQLVETSQVIRLVANILGNEYGHDGTTIIEVTAKMNHQMRKDFDLIKIRDVNDYHHAMDAYLTAYVGDYLYLRYPKLRSYFVYGDFKKLKDQSLKIRNFNFLHDLTNDEAGDKIVDQETGEIIWDKHESVKQLKKVYHYKFMLVSQEVYTRQDALFNQTIYPASDADKRKLIPIKNNKPVDVYGGYSGNVDAYMAIVRIHGKKEDKYKVVGVPMRAVADLKKAESKGRDNYLNAVHEVLKPQFTKKKKDRKTGEITEMMDDFDVLLGKVYYRQLIVDGNKKFMLGSSTYQYNAKQLVLSDKAMQVLSKDDKLKNQDENQNLIDVYDEILEKVDQYFELYDINKFRQKLHDGRKKFIELPVDNDFNGKKLISYGKRATIISILNGLHANATMSNLKYLGISSPFGMLQVPNGIILSPASRICYQSPTGLFERKVKLSDL

SEQ ID NO: 97 - protein, 1381 aa, Lactobacillus fermentum
MDYVKEYHIGLDIGTSSIGWAVTDSQFKLMRIKGKTAIGVRLFEEGKTAAERRTFRTTRRRLKRRKWRLHYLDKIFAPHLQEVDENFLRRLKQSNIHPEDPAKNQAFIGKLLFPDLLKKNERGYPTLIKMRDELPVEQRAHYPVTNIYKLREAMINEDRQFDLREVYLAVHHIVKYRGHFLNNASVDKFKVGRIDFDKSFNVLNEAYEELQNGEGSFTIEPSKVEKIGQLLLDTKMRKLDRQKAVAKLLEVKVADKEETKRNKQIATAMSKLVLGYKADFATVAMANGNEWKIDLSSETSEDEIEKFREELSDAQNDILTEITSLFSQIMLNAIVPNGMSISESMMDRYWTHERQLAEVKEYLATQPASARKEFDQVYNKYIGQVPKEKGFDLEKGLKKILSKKENWKEIDELLKAGDFLPKQRTSANGVIPHQMHQQELDRIIEKQAKYYPWLATENPATGERDRHQAKYELDQLVSFRIPYYVGPLVTPEVQKATSGAKFAWAKRKEDGEITPWNLWDKIDRAESAEAFIKRMTVKDTYLLNEDVLPANSLLYQKYNVLNELNNVRVNGRRLSVGIKQDIYTELFKKKKTVKAGDVASLVMAKTRGVNKPSVEGLSDPKKFNSNLATYLDLKSIMGDKVDDNRYQMDLENIIEWRSVFEDGEIFADKLTEVEWLTDEQRSALVKKRYKGWGRLSKKLLTGIVDENGQRIIDLMWNTDQNFMQIVNQPVFKEQIDQLNQKAITNDGMTLRERVESVLDDAYTSPQNKKAIWQVVRVVEDIVKAVGNAPKSISIEFARNEGNKGEITRSRRTQLQKLFEDQAHELVKDTSLTEELEKAPDLSDRYYFYFTQGGKDMYTGDPINFDEISTKYDIDHILPQSFVKDDSLDNRVLVSRAENNKKSDRVPAKLYAAKMKPYWNQLLKQGLITQRKFENLTMDVDQNIKYRSLGFVKRQLVETRQVIKLTANILGSMYQEAGTDIIETRAGLTKQLREEFDLPKVREVNDYHHAVDAYLTTFAGQYLNRRYPKLRSFFVYGEYMKFKHGSDLKLRNFNFFHELMEGDKSQGKVVDQQTGELITTRDEVAKSFDRLLNMKYMLVSKEVHDRSDQLYGATIVTAKESGKLTSPIEIKKNRPVDLYGAYTNGTSAFMTIIKFTGNKPKYKVIGVPTTSAVGLKRVGKPGSESYNQELHRIIKSNPKVKKDFEIVVPHVSYSQLIVDGDCKFTLASDTYQHPATQLVLSKESMEIIADDFKFVKENPATADEQLVRVFDEIVNQMNHYFTIFDQRSNRQKVTKARDKFVSLPTESEYEGAKKTQVGKTEVITNLLMGLHANAAQGDLKVLGLSTFGFFQSSGGLNLSEDAMIVYQSPTGLFERRICLKDI

SEQ ID NO: 98 - protein, 1306 aa, Sphingobacterium spiritivorum
MKHILGLDLGTNSIGWALIKQNFENKQGEILGMGSRIIPMGAELSKFEQGQAQTKNANRRIARGTRKLNKRYKQRRNKLIYILQGLGMLPDQIKLVNQFSDPNKLDKISILPISKNQQQLTAFDLLELRVKALTEKIELEELGKVIYKYNQLRGYSGGNSEPEKEENNEDESEENEKTNDSFVVFSKVLSLGLPEEITFKGKKLSKRKIAIETEDGIIEAETFLDSLKENDSLELHVNIRRAKSGDTITIKLPSKTSWRKKMENIEKQLADKSKELGREYFISELLFDILKENKWAKIRNNVILRSRYESEFDAVWSEQSKYYPILNHLETDRLQKILEFIFPGQKESQEKLRQTGLKEGLKYVIKNQVVFYQRELKDQSDLISNCRYEPTEKVVAKSHPVFQEYKIWEQINKLVINTKIENGVNRKGEIRYKYIDKPIPVALKEWLYEELQSKKEVSFNPILTKLKKEFKLRENVDFLNGMNAKDKLKGNETKVILQKALGELWNIFGLDDSERQVELWEILYNGKGNEYDLTSERTSNILAFIEKYSPDLENKNDVAIKISKIKFSRNYSNLSLKAIDNILPLVRAGKFFDQNFSEALSHKIVKLLNENVEDPFEKSAQEFLDKNQDVLSDGGIVNAIATILVYDKHTAKEYSGDELIKEFTQISRLKQGELRNPLAEQIINEALVIVRDIWRKYGFKPDEIRVELARELKNNAVERGKMYSANLKSQKHNAEIRNKLIELKQEISIANIEKYKLWVSQENLQEVYLKNYNDPSKSEIEKLKLWESQGHISPYTGQPISLSELFNRERYDVDHIIPQSRYFDDSLSNKVICEKSINNEKGNRTSMEYFEVGSVNYRIFTKDQFIDHANKYFSGKKRKNLLATSIPEDPIQRQIKDTQYISIRIREELNKIVGNENVKTTTGGITDYLRNHWGLTDKFKVLLKERYEAVLPKIAQLEYDNYKKETEKKFTEYKNADVEFNEPILDEEIFIEKFRSEFIRKKNNKLIIKGWSKRIDHRHHAMDALVIACTQPAHIKRLNDLNQVLKEWLDKNKEKFFPGFSGTKTELLDEVLNLEEEKRREIFNQLEKFRAIEMPWKGFPEEAEQKLKEVIVSHKPKDKLLLQYDIQGNKQIKLRGQLHEGTLYGLSNGKEIYRIPINKLAGKQFATEKTIEKIVNPFLKNVIEEHLKSFGKKEEAFSAEGILDLNKKLAERKDEQQNPKPHPPISTIKIYYKDPSKSKKKKTDDEDDISLQKLNRKKSFNDSLYVKTGDNYLFAVMEKEVFNKKLNKDKTERHYDLKLFLTLLIF

SEQ ID NO: 99 - protein, 1358 aa, Acidaminococcus sp.
MGKMYYLGLDIGTNSVGYAVTDPSYHLLKFKGEPMWGAHVFAAGNQSAERRSFRTSRRRLDRRQQRVKLVQEIFAPVISPIDPRFFIRLHESALWRDDVAETDKHIFFNDPTYTDKEYYSDYPTIHHLIVDLMESSEKHDPRLVYLAVAWLVAHRGHFLNEVDKDNIGDVLSFDAFYPEFLAFLSDNGVSPWVCESKALQATLLSRNSVNDKYKALKSLIFGSQKPEDNFDANISEDGLIQLLAGKKVKVNKLFPQESNDASFTLNDKEDAIEEILGTLTPDECEWIAHIRRLFDWAIMKHALKDGRTISESKVKLYEQHHHDLTQLKYFVKTYLAKEYDDIFRNVDSETTKNYVAYSYHVKEVKGTLPKNKATQEEFCKYVLGKVKNIECSEADKVDFDEMIQRLTDNSFMPKQVSGENRVIPYQLYYYELKTILNKAASYLPFLTQCGKDAISNQDKLLSIMTFRIPYFVGPLRKDNSEHAWLERKAGKIYPWNFNDKVDLDKSEEAFIRRMTNTCTYYPGEDVLPLDSLIYEKFMILNEINNIRIDGYPISVDVKQQVFGLFEKKRRVTVKDIQNLLLSLGALDKHGKLTGIDTTIHSNYNTYHHFKSLMERGVLTRDDVERIVERMTYSDDTKRVRLWLNNNYGTLTADDVKHISRLRKHDFGRLSKMFLTGLKGVHKETGERASILDFMWNTNDNLMQLLSECYTFSDEITKLQEAYYAKAQLSLNDFLDSMYISNAVKRPIYRTLAVVNDIRKACGTAPKRIFIEMARDGESKKKRSVTRREQIKNLYRSIRKDFQQEVDFLEKILENKSDGQLQSDALYLYFAQLGRDMYTGDPIKLEHIKDQSFYNIDHIYPQSMVKDDSLDNKVLVQSEINGEKSSRYPLDAAIRNKMKPLWDAYYNHGLISLKKYQRLTRSTPFTDDEKWDFINRQLVETRQSTKALAILLKRKFPDTEIVYSKAGLSSDFRHEFGLVKSRNINDLHHAKDAFLAIVTGNVYHERFNRRWFMVNQPYSVKTKTLFTHSIKNGNFVAWNGEEDLGRIVKMLKQNKNTIHFTRFSFDRKEGLFDIQPLKASTGLVPRKAGLDVVKYGGYDKSTAAYYLLVRFTLEDKKTQHKLMMIPVEGLYKARIDHDKEFLTDYAQTTISEILQKDKQKVINIMFPMGTRHIKLNSMISIDGFYLSIGGKSSKGKSVLCHAMVPLIVPHKIECYIKAMESFARKFKENNKLRIVEKFDKITVEDNLNLYELFLQKLQHNPYNKFFSTQFDVLTNGRSTFTKLSPEEQVQTLLNILSIFKTCRSSGCDLKSINGSAQAARIMISADLTGLSKKYSDIRLVEQSASGLFVSKSQNLLEYL

SEQ ID NO: 100 - protein, 653 aa, Oribacterium sinus
MELINSEEFTFKEELEKHTQVAMKQLSEFTYEDLEDSYFSVPVKRMIWQTLLVVREIEKVMGYAPKRIFVEMTRTEEEKGDKGRKESRGNQLLELYKSIKNTDSHNWKEEIAAADKDGKLRSKKLFLYYMQMGRDMYTGEEIDLGRLYDDNLYDIDHIYPRHYVKDDSIMNNLVLVNRRANQDIKKDLYPIPEQIKANPNVHMLWDALHKQKLITDEKYARLTSNTAFSEKQLGDFIARQLVETGQGTKGVADLLEQLFKDTVIVYAKASNVSDFRRDNGFLKSRLVNDFHHAQDAYLNIVVGNVYYTKFTKNPWNFICKDYEKDKEKNRYNLARMFDWNVVRGSETAWIVERKDEKGTISTVRKMMQKNTPLLTRMNFEQHGSIANATLYSAKKAKSENYLPLKTADEKMSDVKKYGGYTSMSIAYYFIVHHKEDKKENVTIEALPLYCKDKVEREENGLEKYCEEVLGYGEVNIIRRKLKIQSLLEFNGYQVHLSGKTGNQLILRNAISLCLSTKWITYIKKLEKAVNIQIVEEVVTPEENIKLYNLLADKHANTVYSKRPNAYGEKLLADREIFVTLEFGKQCEALLQILSLTKIGSTEANLLLIGESEHSGKILISKNLKASDRPAVINQSPCGLYEKKEWIFDKIVEK

SEQ ID NO: 101 - protein, 1436 aa, Capnocytophaga gingivalis
MKYIKYILGLDIGSNSIGWALIQLDLLQKTKRIIAAGSRIIPMDQKVLSDFGKGITISPTAQRTSYRNARHCRERHLLRRERLHRVLHILGFLPTHYDKQIDFSKRYGKFVDNTEPKIAYNEGKFLFMDSFQEMLSDFKSHQPDLFYTKKNGEESKIPYDWTIYYLRKKALSQKISKEELAWIILNFNQKRGYYQLREEEGNKENDFEIISSKIISVIKKDKDKKYNKYWYDIILENGLVYQAAFYNDFVYNWINQDREFIIERTSLKNGAEKVKLSYLPTFDEIDKMDKKEQDKYYKKIKIKTENSIGNKTVGCYIYDHILQNPNEKIKGKLVRTIERKYYKEELKAILEKQIALQPELFTDQLLADCIRELYSKNEAQQRNLAARDFVHLLVEDIIFYQRPLRRQKSTLANCSLESRSYIDKDSHTRKEAPLKVCPKSNPYYQEFRVLQWLQNLKIYEIDSDQEVTHQFIKTLEDKQQLFEFLMAQKEIDCEELLKYFLNQTYPNAKEKALKSELKKWKDTYRWNYVYDIGEKSSKKYPMNETRYELKRHLEKVANLPDDFLSSEVEYLLWHLIYSVKDKVAYEKGLKKFAQKHHLDKDSFVESFKKFNPYPSEYGSFSEKAIRKLLPLMRFGAHWDFNHIDKNTQKRIEDLITGVENEEIRTILREKAEKYQLEKETDFQDLPLWLAQYIVYNRHAEASSLEKWTSVNDLETYLNEFKQHSLRNPIVEQVVMETLRVVRDIWQQYGQGQASFFNEIHIELGRELKKTAKEREKLSKQNQKNEDINLSIKEKLKELEKYNTRAYSITHQEKYKLWLEQKHISPYTGQIISPENLFTDNYEIEHIIPQSRFFDDSLSNKVVCESIVNKAPYKDRQLGLEFIKNQGGRIVKELSKENKTIKIFTEEQYRTFIKEHYSNNPEKTKKLLLEEIPEKMVARQMNDTCYISKFISEILSKIVRSDEQDEGVHSKNVILCTGKITSILRQDWGLNDIWDNLILPRFERMNNLLQKEKFTIYSIEKQKKIPVVPINDQFKSFQKKRIDHRHHAMDAIIIACTTREHINYINNQHALEKEKDKKEKQEERDKLREKLCIKKYNNRSEGNYSWIFKKPWDTFTQEVRVALEDIVVSFKQNLRVINKATNYYERWVEENGKYIKKMVKQEGTNWAIRKPLHEETISGKIYLDREKITKNDILTATRKTVDSSFDDKRIKKITDTGIQKILLNYLKYKGSPEIAFSPEGLEELNKNLSIYNDGKPHKPIYKVRIYEKGSGRFALGEKGRKYKKYVQGASNLYFGIYQGAKRSFATIPLNEVIERQKQGLPSVPEYNEKGDLLLFSLSPNDLVYVPIEGEIIENIDFRNLSKEQKERIYNVNDFSSTCYFTPNRIAKAIFPKEVDLQRKGDKLSGSYDTKTASLEGIQIKEVCIKLKVDRLGNISKA

SEQ ID NO: 102 - protein, 1069 aa, Bacillus cereus
MNYDIGLRIGITSCGWSIINKDLERIEDLGVRVFEKAENPDGTASAAPRREARKSRRKHRRKKHRIERIKRLIVQHDLLSKKELDSLYLSPFNIDVWNLQVEALERKLDNREFARVLIHLVQRRGFQTIRKSVEIQEEGKLLENVSENERIMKVNGYKTVGEMFSKHEKFTHHKRNKDGSYTSVVTRSLLLKEIKTIFNSQRILGNVFSTQKLESDYLYIWGSQRPTLTYEQLMSMVGNCIYEKKEKRAPKTSWAFQYFSLLQKINKLKVSDDNTLRKLSKEERDIVIELAFKKKNVSFVDIRKALKLNDNTKFNHLTYSHVVETKKVEKATFIELKGYHLIKKQLKDRNVELTQELQPKDYDAIAAASTFFKNDIEFRDYLRNQYLDSNGKRKSNIANKVFEDKVIAAVFELNFSKVCHLSFKSLYKLIPHLEKGLDYKEAILCAGYNFRDENKRDKKLFLPVIQQETNPVVHRALTQARKVINAIIREYGSPNTIRFVVANDLAKTYKQRKELESTLKKNRAENEKIKTKLLSMGIINPTGMDIVKYKLWYEQSGICLYTGRQMELSSLFKPGYSIVNHIIPYNRSFDDTYHNRVLTLTETKYEKGNKIPFEYFGAEETCWNEYEKRVSTSKKIHDKKREKLLIRNFDIEYENEMISNNVFDTHYIGSYFEKYIDEHLQFKKSTKKQKVFSIHGNMVAHLHSRWGFNKNSREIYLNHAVDAAIVAVLTDQLIRNIADYYRRDNILEQKGSLKFPEPWKSFSIELEARISPQVRDLIKKLNLDSYLDVDILHIKPVFISKKPRRKVNGEAHKSTIRSLIGINEIGKTVTCIKTRLEDIPFDENGDFPMYGKDTDKYTYTAIKERYLEFNKDKEKAFSTPLYKLKRNGEPGNQIKSVKIIDTRNIVNKVNQGKGIAYNSNIIRVDVFSRDQKYYVVPIYLRDFIKGSLPNKIITAAKGFMQWPETDNSYTFLFSIFPNDLIKVVPKEGKFIKAKNENKENINLTEILGYFKGLDSSTGAFTLESHDGSLLARGIGTKNLLLIEKYQVDVLGRYNKVGNEERQDIKIQQN

SEQ ID NO: 103 - protein, 1391 aa, Lactobacillus jensenii
MKEIKDYIIGLDIGTNSCGYVVTDKQNNILKLKGKTAIGARLFKEGEAAADRRAFRTTRRRLARRRWRLSLLEEIFDEEMNKVDPSFFRRLKESDYSPKDRRKQFNSIVFESSEADKAFYEKYPTIYHLRNALMHDNQKHDLREIFLAVHHIVKYRGNFLREDSVKAFKAAKFTLQGEDGIGPVDKLNDLLKEIYIEAAPELATDNLSKIEDIIKDKKLYKQDKLKQIANLLPKAVDSKDKAKLNKDIAKQVANALMGYMFRLDTLFSFTDVDVKDYKLKFSDANIDESLDALTSLLTDAQIEFVLELQSIYNTIVLNEIVPDGMSLSESMVKKYDDHKKDLKLYKEYIDSLSDQKKAKQLEAAYALYVNYRKADLLAAKKLFEKKKIGDKKFVDVISNFEVFGKFVSDNLDDSELANKIKARLDLGEFLPKQRTNQNGVIPYQLHQVELTQILEKQGKYYPFLITPNPVESHRNNAPYEISELVSFRVPYYVGPLIDNQSIKDKQNKNKFAWMVRQKQGQITPWNFEEMVDTTESANQFIKRMTRKDTYLLAEDVLPKSSLIYQKFMILDELNRIKIDGKKLTSKLKHDIFEKLFKKQKSINLDNLKNYLLAEGNIPGLIEGLSDGINFNNSFSTYIDYRNIFGDEIDNPNKQADFEKMIEWSTVFEDRKIFKRKLKEITWLTPEQIKQVSSKRYSGWGRLSKKLLTQITDENGVNILQRLWNEPETLTEVLANPVIKRKISEANSLFVQINKVENILDDAYTSPQNKKAIRQVIRVVDDIIAAAHGKKPSQIAIEFARSSQNKAKVPDTRKKQLDKIYNKISSEILDSSIKNELKNLKSNKYLSKDKLFLYFKQMGRDAYTGDKLSLDQLQNYDIDHIFPRSFIKDDSLDNRVLTQKPINAKKSDYGIPALEFGNKYVPDLGITVKEMWKLWQENGLISKSKLINLCTNPKKIGSKRASGFINRQLVETSQVIKLVAIILQAEFPDTEIIEVKALQNTTLRESFHLYKNRSVNDYHHAIDAYLTTIVGNYLYQVYPKLRPYFVYGQFKKFNQEKNIDILKRLKNFNFLRQLIFNTDDNIYISGTKEIVFNKKDIIHKLETAYGYKYMNISRECYQETSSLFNQTLYAHNSSVKNSLIPKKKGLPTEIYGGYSGNKDSFFVLVKIVKKRTNLYRIVGIPTRELAKLNSSNNYNQALNKIVESKLCLKETESFKILIKRLLYGTLIVDNGQKFRIGSFKEKHNVQQLVLQLKSMKYIKFYIDGGQNYFTDVERKKLEKQDRDKCLLYVFDDIMNVVNKRFTLFDMSKYEKDGDSLREKFNCLDFNDKVSILSDLLKAFHANSDRTSITKLKITNLGRHQAGKNGITLTTNAQIIYQSPTGLFERRIKIKDL

SEQ ID NO: 104 - protein, 1114 aa, Eubacterium rectale
MNYTEKEKLFMKYILALDIGIASVGWAILDKESETVIEAGSNIFPEASAADNQLRRDMRGAKRNNRRLKTRINDFIKLWENNNLSIPQFKSTEIVGLKVRAITEEITLDELYLILYSYLKHRGISYLEDALDDTVSGSSAYANGLKLNAKELETHYPCEIQQERLNTIGKYRGQSQIINENGEVLDLSNVFTIGAYRKEIQRVFEIQKKYHPELTDEFCDGYMLIFNRKRKYYEGPGNEKSRTDYGRFTTKLDANGNYITEDNIFEKLIGKCSVYPDELRAAAASYTAQEYNVLNDLNNLTINGRKLEENEKHEIVERIKSSNTINMRKIISDCMGENIDDFAGARIDKSGKEIFHKFEVYNKMRKALLEIGIDISNYSREELDEIGYIMTINTDKEAMMEAFQKSWIDLSDDVKQCLINMRKTNGALFNKWQSFSLKIMNELIPEMYAQPKEQMTLLTEMGVTKGTQEEFAGLKYIPVDVVSEDIFNPVVRRSVRISFKILNAVLKKYKALDTIVIEMPRDRNSEEQKKRINDSQKLNEKEMEYIEKKLAVTYGIKLSPSDFSSQKQLSLKLKLWNEQDGICLYSGKTIDPNDIINNPQLFEIDHIIPRSISFDDARSNKVLVYRSENQKKGNQTPYYYLTHSHSEWSFEQYKATVMNLSKKKEYAISRKKIQNLLYSEDITKMDVLKGFINRNINDTSYASRLVLNTIQNFFMANEADTKVKVIKGSYTHQMRCNLKLDKNRDESYSHHAVDAMLIGYSELGYEAYHKLQGEFIDFETGEILRKDMWDENMSDEVYADYLYGKKWANIRNEVVKAEKNVKYWHYVMRKSNRGLCNQTIRGTREYDGKQYKINKLDIRTKEGIKVFAKLAFSKKDSDRERLLVYLNDRRTFDDLCKIYEDYSDAANPFVQYEKETGDIIRKYSKKHNGPRIDKLKYKDGEVGACIDISHKYGFEKGSKKVILESLVPYRMDVYYKEENHSYYLVGVKQSDIKFEKGRNVIDEEAYARILVNEKMIQPGQSRADLENLGFKFKLSFYKNDIIEYEKDGKIYTERLVSRTMPKQRNYIETKPIDKAKFEKQNLVGLGKTKFIKKYRYDILGNKYSCSEEKFTSFC

SEQ ID NO: 105 - protein, 1362 aa, Lactobacillus paracasei
MTKLGKPYGIGVDIGSNSIGFAAVDENSHLIRLKGKTVIGARLFEEGKAAAKRRAGRTTRRRLSRNRWRLSFLRDFFESHITPTDPNFFMRQKYSEISPKDKARYKYEKRLFNDRTDAEFYQQYSTMYHLRNRLMTDPSRADVREIYFAIHHILKSRGHFLTPGDAKDFNTNDVALDEIFPALQDAYAQVYPDLGITFDEDKANEFKTILLNEIATSIDTQRALVKLLLAEEDDKDILKQQKQVLTEFAKAVVGLKTKLNLALGTEVDSSEATAWNFSLGQLDDKWAGIESAMTDEGTEILDQIRDLYRARLLNGIVPTGKTLSQAKVDDYTQHHEDLQLFKAYLKQLEDDGTAKAIRQLYDRYIDGDDAAPFLRENFVKALTKDVTAHPNTKSPELLERLAQPDFMLKQRNKANGAIPVQMQQRELDQIIKNQAVYYDWLAAPNPVEKHRKSMPYQLDELLNFRIPYYVGPLVTAKEQKAAQGGVFAWMVRKDPEGNITPYNFDEKVDREASANTFIQRMKTTDTYLIGEDVLPKQSLLYQRYEVLNELNNVRVNNEKLSIEQKQQVIRELFERHNSVTIKQFAENLRAHGDYAHIPEIRGLADEKRFLSSLSTYRQLKSLLPEAIDDPAKQADIENIIAWSTVFEDAAIFKTKLKEISWLGSEAITKLSNIRYRGWGQFSRKFLNGLTLGNGHTIIQELLLSTNNLMQILTDETLQKKMTELNADKLKTANINDAIDNAYTSPSNKKALRQVLRVVDDIKRAADGQDPSWLYVETADGGGTPGKRTRARQHQLQEIYANAAHELIDTAVRGELEDKISDKADFNDRLVLYFMQGGRDIYTGAPLNIDQLSSYDIDHILPQSLIKDNSLDNRVLVHAIINREKNATFASTIYAQKMNATWRQWHEAGLISGRKLRNLQMRPDQIDKYASGFVARQLVETRQIIKLTEQIVAAQYPDTKIIAVKAGLSHQLREELEFPKNRDVNHYHHAFDAFLAARIGTYLLKRFPNLQAFFTYGKFTKADVKKLRGFNFIRDITHAEDKIVAKDTGEVVWDKQRDVDELDRIYNFKRMLITHEVRFETADLFKQTVYGARDSKEAGGSKQLIPKKKGYPVDIYGGYFRENTAYLAVVKVTKKTETIFKVVKIATSQVAALNKARSRSTAEELSVLTELLKPKFSKVGKNGKITDTPFEVVLPRVPREQLFYNAKYGFFMVNSDTMFHNFQEIWVSRSDQKILQQIRKAKIDYPNVDQDLDNLFHNLADQIVKYFDLYSIAGFKEKISQSQNTFNDLAVDDTDQSVGKITVINELLKGAQANGMTGSLKVLKISTPFGFTQDKSGVLTKDSSIIYQSPTGLFERSVRLTDL

SEQ ID NO: 106 - protein, 1056 aa, Actinobacillus minor
MKALNYILGLDLGIASVGWAVVEIDQNELPIRLIDLGVRTFERAEVPKTGDSLALARRLARSSRRLVRRRAVRLLKAKRLLKQEGILQADDFHSSHLKPLPNNPWELRVKGLNHLLDRKEWAAVLLHLLKHRGYLSQRKNESKTDNKELGALLKGVSENRQLLQAQAFSTPAEIAIKKFQQEEGHIRNQRGAYSHTFDRNDLLAELRLLFQKQREFNNPYTSQSLEQAIAELLMWQKPALSGEAILKMLGKCTFEPSEYKAPKNSYSAEYFVWLTKLNNLRILENGADRGLTAEERQLLINQPFEKAKFTYAQARKLLELSDLAIFKGVRYGKDNAESATLMEMKAWHAIRKALESNGLKTEWNGLKTKPELLDKIGTAFSIYKTDEDISQYLNGELSPAVLNALLENLSFDKFIRLSLQSLAKILPLMEQGLRYDEACKQVYGDHYGKKEQLELRFLPKIPVEDIRNPVVLRTLSQARKVINGVVRLYGSPARIHIETGREVGKSFSERRDISKRQEENRNERQRAVEKFKEFFPHFVGEPKAKDILKMRLYEQQHGKCLYSGKELDLNRLLEKGYVEIDHALPFSRTWDDSFNNKVLVLASENQNKGNQTPYEWLNGKENAERWKLFQALVNGSRFPYSKKQRILTKYLDEDGFRERNLNDTRYVARFLCNFIEDNMQLVGQGKKRVFASNGQITALLRRSWGIQKVREDNDRHHAVDAVVVACSTRALQKKITDYVRYKEMNVFTGEKIDQETGEIIKFHFPEPWKFFRQEVEIRVFSETPAEDVVIALPDRPQANHEFIQPLFVSRAPTRKMTGQGHMETIKSAKRLAEGLSVSRVPLTQLKLKDLENMVNREREKALYEALKVRLEKFNNDPAKAFADPFYKKGGQQVKAVRVEQVQKSGVLVRQENGVADNASMVRVDVFIKGGKYFLVPIYTWQVAKGILPNRAATQGKEEEYWDIMDETAIFQFSLYQNDLIKLVTKKKTIFGYFNGLNRATSNINIKEHDLDKSKGKDGIYLEVGVKLALSLEKYQVDELGKNIQPCRSMKKRPPVR

SEQ ID NO: 107 - protein, 1081 aa, Neisseria flavescens
MTAFKPNPINYILGLDIGIASVGWAMVEIDEEENPIRLIDLGVRVFERAEVPKTGDSLAAARRLARSVRRLTRRRAHRLLRARRLLKREGVLQAADFDENGLIKSLPNTPWQLRAAALDRKLTPLEWSAVLLHLIKHRGYLSQRKNEGETADKELGALLKGVADNAHALQTGDFRTPAELAVNKFEKESGHIRNQRGDYSHTFSRKDLQAELVLLFEKQKEFGNPHISDGLKEGIETLLMAQRPALSGDAVQKMLGYCTFEPTEPKAAKNTYTAERFIWLTKLNNLRILEQGSERPLTDTERATLIDMPYKNKLTYAKARELLGLDDTAFFKGLRYGKDNAESATLMEMKAYHAIRRALEKEGLKDKKSPLSLSPELQDEIGTAFSLFKTDEDITGRLKGCLQPEILDALLKHINFDKFVQISLKALRRIVPLMEQGKRYDEACAETYGDHYGEKNSEEMLYLPPIPADEIRNPVVLRALSQARKVINGVVRRYGSPARIHIETAREVGKSFKDRKEIEKRQEENRKDREKAAAKFREYFPNFVGEPKSKDILKLRLYEQQHGKCLYSGKAIDIRRLNGKGYVEIDHALPFSRTWDDSFNNKVLVLGSENQNKGNRTPYEYLNGKDNSREWLEFKARVETSRFPHSKKQRVLLQKFDEKGFKERNLNDTRYVNRFLCQFVADHMQLTGKGKRRVFASNGQITNLLRGFWGLHKVRAENDRHHALDAVVVACSTVAMQQKITCFVRYKEMNAFDGKTVDKETGEVLHQKTHFPQPWEFFAQEVMIRVFGKPDGKPEFEEADTPEKLRALLAEKLSSRPEAVHEYVTPLFVSRAPNRKMSGAHKDTLRSAKRFVKHNEKISVKRVWLTEIKLADLENMVNYKNGREIELYEALKARLGAYGGNAKQAFDPKDNPFYKKGGQLVKAVRVEKTQESGVLLNKKNAYTIADNGDMVRVDVFCKVDKKGKNQYFIVPIYAWQVAENILPDIDCKGYRIDDSYTFCFSLHKYDLIAFQKDEKSKVEFAYYINCDSSNGRFYLAWHDKGSKEQQFRISTQNLVLMQKYQIDELGKEIRPCRLKKRPPVR

SEQ ID NO: 108 - protein, 1392 aa, Gemella haemolysans
MANKTWYLGLDIGSASVGWAATDTGYKIIRKNKKRLWGVRLFEEAKTAEDRRGYRSSRRRLARRKWRLNLLEELFTSEVKKVDENFFLRLKESQYHYEDKTHKVPYAIFNDKDYTDKDYYKDYPTIYHLRSKLMTEENPDIRKVFLAIHHIIKNRGHFLLQGQSFKDGNLNNLIKELLELDILHVGFEVTEEVVDKIADISLEKKTSKDKLNDIKELYPKEKQLLEVFRLIFGGKTSLDKLFAIDEYKELDAAIKSVSFKEKIYEEVRHDYEQVLSNYIELLDLAKLVYDSIILSDIKKEGKTLSESKVELFEKHRDDLLKLKNLVKNDSKLSEDKKVELYALIFKEDKDKGTNYVNYIRKSEEGKGCNYEDFKKFLVKELAKLEESSVKTEIIKDLELEQFLPLQRTKDNSVVPYQIHKEELVKILDNAARYHSFLNEKDESGYNVREKVIQLLEFRIPYYVGPLNSSKKAKEGGFAWSVRNTGYENTPVTPWNYSKVIDESASAEKFITNLTNKCTYLKGEDVLPKSSLLYSEFALLNELNALKYDGNRISLEARNTIIEKLFKQQGKKVTKTSIKNLLKAEGYIDGKGEITGIDITVKNDLKSYRDFKKILGNKFNSEHVENIILWITLYGESRKLIKAKIESVYGEVYSKDEITKMSRLVYKDWGRFSRKLLTELVSKKLYNEETGECLNIIGAMRQNNILFMELLADRFDYSKQIVEFNKELQEDVTEIAPEILDDLYVSPAVKRSIWQTVRIVEELKKIIGCAPAKIFVETTRSNQEKKKPTDSRKKQLELAYKAVKKDVKELEKEIGTINFDVLNDRLSSVEPSKLKAKKLYLYYTQLGRCMYSEEPINISELFDNNKYDIDHIYPQSKIKDDSFTNTVLVKRESNAAKTDRYPLGSDIQTPSNRRFWKFLKEKGLISDEKYNRLVRTEEFSDEELSGFIARQLVETSQSVKAVASILGELNPETSICYSKAENVSSFRQNFGKIKKGDRDSKNNDQLIKVREINDYHHAKDAYLNVVVGNVYDTKFTRNVFNFIKDKKDGRKYSLNKVFYENVSDSKTVAWEMDKTIHQVEKVMNNNNIMVTRRTSEQKGGLFDATVYKAKVAAKAKDGVYYPLKTSNSVVKDVAKYGGYTSIGIAYYSIFEYTIVNKKGEEKITRIIPIPIYISQNIKDSTALIEFGKSQIFCRAYEKIKDFKLLYRKLCIGSKININNYQYYIGGKSDERFYYDSAIQVTLDKKSEKYLKILSKYQNWKKENKDGELWENITKENNIELYNKLVEKMNSEIFTKKKSNKYNELNSEEIRNNFIKISVEEQAKVLLEILNLLTNKKSIFDLKSIDIKAARGKISFNLTSLIQFSIIEQSITGFYEKEITIIGDKGNDMENNNS

SEQ ID NO: 109 - protein, 702 aa, Helicobacter pullorum
MRKILKIDERIQFKEVDYTAKNPENKKFVEFKNLKKFCEILGAIVGDRALADSIARDMTLIKDEEELAQKLRGYGKFSQEQITQLSALHFSHHISLSLKALSEILPFMREGMRYDEACQEAKLQAKHNDKKSKFLPPFCESIYADELTNPVVHRAIAEYRKILNALIAKYGSVHKIHIELTRDVGKNFQEREKYKKEIESNYKARVQAMQECEKLGLTLSEGNILKLRLFREQNEICVYSGRKITLANLKEQGALEIDHILPYSRSSDDSYMNKVLVFTNENQNKGNKTPYEAFGGDSQKWGEIESLALRSGYPKKKAKRILDKGFGDREAGFKSRNIVDSGYIARLIANYTKEYLKFLPLDSHENTALIAGEKDSKIHVEAVKGMLTATMRHFWGLGSKNRYEHTHHAVDAIIIAYINAAMIQRFSQFRQNQESLKARFYAKELAKEEFKTQRAFFEPFSGFREQVLAKVGQIFVSRPPRKRARGALHEETFYSIDDKKLSETYGGKKGVQRALSLGKIRQIGTKIVANGPMVRVDIFKHTQSGRFYAVPIYTMDFALGILPNKAVVSGKDKDRIIKDWLEMDSCYEFCFSLFKDDVIEVQKRDMEKPELAYFVSLDASDGRIKVRHHCNDITKINENQKKLFSEAIEKEVVGRGSIQNLKVFKKYKVSPLGEIKEAKYEPRQPIALKTSPKKHRKQNNAQ

SEQ ID NO: 110 - protein, 1371 aa, Streptococcus dysgalactiae
MDKKYSIGLDIGTNSVGWAVITDDYKVPSKKFKVLGNTDRHSIKKNLIGALLFDSGETAEATRLKRTARRRYTRRKNRIRYLQEIFSSEMSKVDDSFFHRLEESFLVEEDKKHERHPIFGNIVDEVAYHEKYPTIYHLRKKLADSTDKADLRLIYLALAHMIKFRGHFLIEGDLNPDNSDMDKLFIQLVQTYNQLFEENPINASRVDAKAILSARLSKSRRLENLIAQLPGEKRNGLFGNLIALSLGLTPNFKSNFDLAEDAKLQLSKDTYDDDLDNLLAQIGDQYADLFLAAKNLSDAILLSDILRVNSEITKAPLSASMIKRYDEHHQDLTLLKALVRQQLPEKYKEIFFDQSKNGYAGYIDGGASQEEFYKFIKPILEKMDGTEELLAKLNREDLLRKQRTFDNGSIPHQIHLGELHAILRRQEDFYPFLKDNREKIEKILTFRIPYYVGPLARGNSRFAWMTRKSEETITPWNFEEVVDKGASAQSFIERMTNFDKNLPNEKVLPKHSLLYEYFTVYNELTKVKYVTEGMRKPEFLSGKQKEAIVDLLFKTNRKVTVKQLKEDYFKKIECFDSVEISGVEDRFNASLGTYHDLLKIIKDKDFLDNEENEDILEDIVLTLTLFEDKEMIEERLKKYANLFDDKVMKQLKRRHYTGWGRLSRKLINGIRDKQSGKTILDFLKSDGFANRNFMQLINDDSLTFKEAIQKAQVSGQGHSLHEQIANLAGSPAIKKGILQSVKVVDELVKVMGHKPENIVIEMARENQTTQKGQKNSRERMKRIEEGIKELGSQILKEHPVENTQLQNEKLYLYYLQNGRDMYVDQELDINRLSDYDVDHIVPQSFIKDDSIDNKILTRSDKNRGKSDNVPSEEVVKKMKNYWRQLLNAKLITQRKFDNLTKAERGGLSELDKAGFIKRQLVETRQITKHVAQILDSRMNTKYDENDKLIREVKVITLKSKLVSDFRKDFQFYKVREINNYHHAHDAYLNAVVGTALIKKYTKLESEFVYGDYKVYDVRKMIAKSEQEIGKATAKRFFYSNIMNFFKTEITLANGEIRKRPLIETNEETGEIVWDKGRDFATVRKVLSMPQVNIVKKTEVQTGALTNESIYARGSFDKLISRKHRFESSKYGGFGSPTVTYSVLVVAKSKVQDGKVKKIKTGKELIGMTLLDKLVFEKNPLKFIEDKGYGNVQIDKCIKLPKYSLFEFENGTRRMLASVMANNNSRGDLQKANEMFLPAKLVTLLYHAHKIESSKELEHEAYILDHYNDLYQLLSYIERFASLYVDVEKNISKVKELFSNIESYSISEICSSVINLLTLTASGAPADFKFLGTTIPRKRYGSPQSILSSTLIHQSITGLYETRIDLSQLGGD

SEQ ID NO: 111 - protein, 1007 aa, Helicobacter canadensis
MKVLGFDIGINSIGWAFVENNELKDCGVRLFTKAENPKTKESLALPRRNARSSRVRLRRRRSRLLSLKHIISKEFGLHYEDYIALDGNLPKAYTGKIESIYKLRYEALSQAISKEDLARVILHIAKHRGYMNKNQKTSQDSEKGAILSAIKENSNKIKHYQTAGEYFYKELFENLRDGTKEFKNIRNKAMKNEKTGNMESTYYNTILASDLEKELKLILEKQQAYHNYSDTFIKEVLEIAFYQRPLKDFSHLVGSCTFYENEKRACKNSYSAWEFIALGKIINTLESIKKDTGEIFSNEIITQILKEVLDKGSLSYTKLRKMINLDEKVKFKGLKYDKEGVEKTNLIEFKKLKEFKKALGEHNLERKTLDEIATHITLTKDENQLKKQLEQYALSQNQIDALAELDFNDHINLSFKALYEILPLMEKGKRYDEACNELGLKAKTSNQKSEFLPAFCDSIFAQELTNPIVNRAISEYRKVLNRLLKKYGKMHKIHIELARDAGLSKEARNKIEKEQKENKDINDKAEKTCKEFGLKPNAKNILKIKLWREQGEICAYSGKKITIDDLKEDKALEVDHIYPYSRSYDDSYNNKVLVFIKENQLKLNQTPYEAFGSNQEKWSKIQVLAQKLPYKKKNRILDENFKNKDQIEFISRNLNDTRYATSLIAKYTKEYLEFLPLSDDEDISLKSGEKGSKTHVQTMNGMLTSVLRHAWGFSQKDRNNHLHHALDAIIIAYSTNSIIKAFSDFKKNQEILKAKLYAKKLTSEEYKNQSKFTGFEKYRSKILEKLDSIFVSKPPNKNTKGALHEQTFYSYQDILEEYKTQEGLKRALECGKVRKIGTKYVVNDRMVRLDIFKKDNKFYGIPIYTMDFALGVLPNKVVTIGTDKDKIKKEWKTIDETYEFCFSLYKGDLVLIQKKEMQESEFAYYNGFDISSASISLEKHDNKFENLTENQKLLFPKAKEGDVEVRGIGIQGLKVFKKYMVTPLGEIQETRTEARQNIQPRKKHGLR

SEQ ID NO: 112 - protein, 1397 aa, gamma proteobacterium
MTKNYISPIAIDLGAKFTGVALYQYLEGADCTQEVAKGLLVDDRGNVTWSQEGRRGKRHQVRGYKRRKMAKRLLWLILDSEYGIKREEVTEPLLKFINGLLNRRGYTYISEEVDEESMNVSPLPFSEMMPDYFNSSAPLLEQLAKLLSDKNKLVRFRAEGKIPSNKNEFKKLLDTALDGKYKDEKKELSEAWGNILIASENVLKSTVDGHKSRSEYLANIKEDIKSNEELEKQISSKEIDGFYNLVGHLSNFQLRLLRKYFNDPNMSGVSYWDEKRLEKYFYQWVQGWHTKGGTDEAEKKNIILKTKGAPLLKTLKSLSADLTIPPYEDQNNRRPPKCQSVLLSDEKLTMHYPKWKEWVGQLVKQNDNAYLNENVTLANALHRIVERSRSIDPYQLRLLISITDAEKRNDLAGYKRLKLSLGSEVDEFLLLVKNIVDETKEAREGLWFETENKLFFKCGKTPPRKEKLKSTLLSAVLGKNLSDDEQSSFIEEFWKSGTPKIERRNVRGWCRLASQVQKTYGVYLKEYGLQQLHKLEAGKKLDDKPLALLYKNSGLIASKIGEALNIEPDEVSRFASPHSLAQIFNIIEGDVAGFNKTCRACTYENIWRMQEEKVESLLTNQLLSEIHGERKVPLKSAMCTRLSADSTRPFDGQMASIIEHIARKIAQHKIAQINDVPKEFSIDIPIIIESNQFSFTAELEEIKRGRGSAKAKKAKELGEKSKAGWVSKTERIKTSSEGICPYTGAPLGGSGEIDHIIPRSLTGRTKKTVFNSEANLIYCSSKGNHDKGNRVYVIEQLNDKYLKKQFSTSDVNLIKKKIKTTIQRFTEGGEKLRSFSELSREDQKAFRHALFVPELKSEVTSLLAVKNITRVNGTQAWLAKKIASLLAEHLDKQGRDYTLSAHQIDPWSVSKQRKMLASAEPIWAKKDPQPAASHVVDAVCTFLEALEQPHTASRLKTISSTSFEKTGWRSALIPDLIKVDALDRRPKYRRYNIGSTSLFKDGIYAERFLPILIDENGLMAGYDIDNSLKAKGADVVFESLSPFLLFKGEEVGAQSLSDWQERIDGRYLYMSIDKVKAFDYLQEKVGEKDIAAELLNSIHFTQRKTELRAKFSDDSGKKMKTLDAIRKSLKLTVTVNEIGKRKEKCGFSGTIGIPAKSAWENLLDEPLLETYWGTKMPPQEIWEKVYRKHFPRNIPNQAHRKVRKDFSLPVVDSVSGGFRVKRKTPNGYNYQLLAIDGYSAVGFKKEGDNVDFKSPALVPQIAESKSVTPISSELVHLDKNEIVYFDEWRKIDISDSDLKQFVSSLELAPGSQNRFYIRFTVDEDQFERHFKSALRVNGIQDLDTVNKTFDWNREIPSLLIPPRSNLFLLETGQKITFEYIANGANAEVKKAYSLRRA

SEQ ID NO: 113 - protein, 1082 aa, Neisseria meningitidis
MAAFKPNPINYILGLDIGIASVGWAMVEIDEEENPIRLIDLGVRVFERAEVPKTGDSLAMVRRLARSVRRLTRRRAHRLLRARRLLKREGVLQAADFDENGLIKSLPNTPWQLRAAALDRKLTPLEWSAVLLHLIKHRGYLSQRKNEGETADKELGALLKGVADNAHALQTGDFRTPAELALNKFEKESGHIRNQRGDYSHTFSRKDLQAELILLFEKQKEFGNPHISGGLKEGIETLLMTQRPALSGDAVQKMLGHCTFEPAEPKAAKNTYTAERFIWLTKLNNLRILEQGSERPLTDTERATLMDEPYRKSKLTYAQARKLLGLEDTAFFKGLRYGKDNAEASTLMEMKAYHAISRALEKEGLKDKKSPLNLSPELQDEIGTAFSLFKTDEDITGRLKDRIQPEILEALLKHISFDKFVQISLKALRRIVPLMEQGKRYDEACAEIYGDHYGKKNTEEKIYLPPIPADEIRNPVVLRALSQARKVINGVVRRYGSPARIHIETAREVGKSFKDRKEIEKRQEENRKDREKAAAKFREYFPNFVGEPKSKDILKLRLYEQQHGKCLYSGKEINLGRLNEKGYVEIDHALPFSRTWDDSFNNKVLVLGSENQNKGNQTPYEYFNGKDNSREWQEFKARVETSRFPRSKKQRILLQKFDEDGFKERNLNDTRYVNRFLCQFVADRMRLTGKGKKRVFASNGQITNLLRGFWGLRKVRAENDRHHALDAVVVACSTVAMQQKITRFVRYKEMNAFDGKTIDKETGEVLHQKTHFPQPWEFFAQEVMIRVFGKPDGKPEFEEADTPEKLRTLLAEKLSSRPEAVHEYVTPLFVSRAPNRKMSGQGHMETVKSAKRLDEGVSVLRVPLTQLKLKDLEKMVNREREPKLYEALKARLEAHKDDPAKAFAEPFYKYDKAGNRTQQVKAVRVEQVQKTGVWVRNHNGIADNATMVRVDVFEKGDKYYLVPIYSWQVAKGILPDRAVVQGKDEEDWQLIDDSFNFKFSLHPNDLVEVITKKARMFGYFASCHRGTGNINIRIHDLDHKIGKNGILEGIGVKTALSFQKYQIDELGKEIRPCRLKKRPPVR

SEQ ID NO: 114 - protein, 1334 aa, Listeria monocytogenes
MKKPYTIGLDIGTNSVGWAVLTDQYDLVKRKMKISGDSEKKQIKKNFWGVRLFEKGETAAKRRMSRTARRRIERRRNRISYLQEIFAIQMNEVDDNFFNRLKESFYAESDKKYNRHPFFGTVEEEVAYYKDFPTIYHLRKELIDSQKKADLRLVYLALAHIIKYRGHFLIEGALDTKNTSIDEMFKQFLQIYNQVFANDIEEASLKKTEKNQEVAQILAEKFTRKDKLDKILSLYPGEKTTGVFAQFVNIIVGSTGKFKKHFNLHEKKDINCAEDTYDTDLESLLAIIGDEFAEVFVAAKNAYNAVVLSNIITVTDSTTRAKLSASLIERFENHKEDLKKMKRFVRTYLPEKYDEIFDDTEKHGYAGYISGKTKQADFYKYMKATLEKIEGADYFIAKIEEENFLRKQRTFDNGVIPHQLHLEELEAILHQQAKYYPFLREDYEKIKSLVTFRIPYFVGPLAKGQSEFAWLTRKADGEIRPWNIEEKVDFGKSAVDFIEKMTNKDTYLPKENVLPKHSLCYQKYMVYNELTKVRYIDDQGKTNYFSGQEKQQIFNDLFKQKRKVKKKDLELFLRNINQIESPTIEGLEDSFNASYATYHDLLKVGMKQEILDNPLNTEMLEDIVKILTVFEDKRMIKEQLQQFSDVLDGTVLKKLERRHYTGWGRLSAKLLVGIRDKQSHLTILDYLMNDDGLNRNLMQLINDSNLSFKSIIEKEQVSTTDKDLQSIVAELAGSPAIKKGILQSLKIVDELVSVMGYPPQTIVVEMARENQTTNKGKNNSKPRYKSLEKAIKEFGSQILKEHPTDNQELKNNRLYLYYLQNGKDMYTGQELDIHNLSNYDIDHIVPQSFITDNSVDNLVLTSSAGNREKGDNVPPLEIVQKRKIFWEKLYQGNLMSKRKFDYLTKAERGGLTEADKARFIHRQLVETRQITKNVANILHQRFNYKTDGNKDTMETVRIVTLKSALVSQFRKQFQFYKVREVNDYHHAHDAYLNGVVANTLLKVYPQLEPEFVYGEYHQFGWFKANKATAKKQFYTNIMLFFAQKDRIIDENGEILWDKRYLETVKKVLGYRQMNIVKKTEIQKGEFSNVTPNPKGKSNKLIPRKKDWDPIKYGGFDGSKMAYAIIIEYEKQKRKVRIEKKLIQINIMEREAFEKDEKTFLEEKGYHQPKVLIKVPKYTLYECKNGRRRMLGSANEAHKGNQMLLPNHLMALLYHAEKYEAIDGESLAYIEVHRALFDELLAYISEFARKYTLSNDRLDEINMLYERNKDGDVKSIAESFVSLKKFNAFGVHQDFSFFGTKIERKRDRKLNELLNSTIIYQSITGLYESRKRLDN

SEQ ID NO: 115 - protein, 1337 aa, Enterococcus faecalis
MKKDYVIGLDIGTNSVGWAVMTEDYQLVKKKMPIYGNTEKKKIKKNFWGVRLFEEGHTAEDRRLKRTARRRISRRRNRLRYLQAFFEEAMTALDENFFARLQESFLVPEDKKWHRHPIFAKLEDEVAYHETYPTIYHLRKKLADSSEQADLRLIYLALAHIVKYRGHFLIEGKLSTENISVKEQFQQFMIIYNQTFVNGESRLVSAPLPESVLIEEELTEKASRTKKSEKVLQQFPQEKANGLFGQFLKLMVGNKADFKKVFGLEEEAKITYASESYEEDLEGILAKVGDEYSDVFLAAKNVYDAVELSTILADSDKKSHAKLSSSMIVRFTEHQEDLKKFKRFIRENCPDEYDNLFKNEQKDGYAGYIAHAGKVSQLKFYQYVKKIIQDIAGAEYFLEKIAQENFLRKQRTFDNGVIPHQIHLAELQAIIHRQAAYYPFLKENQEKIEQLVTFRIPYYIGPLSKGDASTFAWLKRQSEEPIRPWNLQETVDLDQSATAFIERMTNFDTYLSSEKVLPKHSLLYEKFMVFNELTKISYTDDRGIKANFSGKEKEKIFDYLFKTRRKVKKKDIIQFYRNEYNTEIVTLSGLEEDQFNASFSTYQDLLKCGLTRAELDHPDNAEKLEDIIKILTIFEDRQRIRTQLSTFKGQFSAEVLKKLERKHYTGWGRLSKKLINGIYDKESGKTILGYLIKDDGVSKHYNRNFMQLINDSQLSFKNAIQKAQSSEHEETLSETVNELAGSPAIKKGIYQSLKIVDELVAIMGYAPKRIVVEMARENQTTSTGKRRSIQRLKIVEKAMAEIGSNLLKEQPTTNEQLRDTRLFLYYMQNGKDMYTGDELSLHRLSHYDIDHIIPQSFMKDDSLDNLVLVGSTENRGKSDDVPSKEVVKDMKAYWEKLYAAGLISQRKFQRLTKGEQGGLTLEDKAHFIQRQLVETRQITKNVAGILDQRYNANSKEKKVQIITLKASLTSQFRSIFGLYKVREVNDYHHGQDAYLNCVVATTLLKVYPNLAPEFVYGEYPKFQAFKENKATAKAIIYTNLLRFFTEDEPRFTKDGEILWSNSYLKTIKKELNYHQMNIVKKVEVQKGGFSKESIKPKGPSNKLIPVKNGLDPQKYGGFDSPVVAYTVLFTHEKGKKPLIKQEILGITIMEKTRFEQNPILFLEEKGFLRPRVLMKLPKYTLYEFPEGRRRLLASAKEAQKGNQMVLPEHLLTLLYHAKQCLLPNQSESLAYVEQHQPEFQEILERVVDFAEVHTLAKSKVQQIVKLFEANQTADVKEIAASFIQLMQFNAMGAPSTFKFFQKDIERARYTSIKEIFDATIIYQSTTGLYETRRKVVD

SEQ ID NO: 116 - protein, 1426 aa, Capnocytophaga ochracea
MKNILGLDLGTTSIGFAHIVEDENKEKSEIKELGVRIVSLTTDEQSDFEKGKSITTNANRTLKHGARLNLDRYQQRRKYLIDLLQKANLITPSSILAENGKNTTHSTWQLRAKAVTERIEKEEFARILLAINKKRGYKSSRKAKTEDEGQAIDGMAIAKRLYDENLTPGQLSLQLLQQNKKLLPDFYRSDLQKEFDLVWNFQKQFYPDILTDIFYKELQGKGKDATSKAFSKRYHFDTTENKGSKESVRLQAYQWRAEAISKQLSKEEVAYVLTEINNNLNNASGYLGAISDRSKELYFNRQTVGQYLYAKLQENRHNSLKNKVFYRQDYLDEFERIWETQASFHKELTDELKKQIRDVVIFYQRKPKSQKGLISFCEFESKEIEIEKDGKTITKNIGARVVPKSSPLFQEFKIWQILNNVICKRKGIRKKKISAKTTQLDLLNESSQTIFSLDMECKQLLFDELNLKGDLKSDKVLKLLGYSPQEWEINYNQLEGNRTQKALYEAYLKIVEMEAHDVKDILQIKSAKDDWSLDESPLSASEIREKVKAIFQTLGICTKILYFDPLLPVKEFEEQDSYQLWHLLYSYESDDSTSGNETLYRILEKKYAFKREHARILANVALQDDYGSLSTKAIRKIYPNIKENQYSTACEKAGYKHSKLSLTTEELEARELKNIIPLLKKNALRNPVVEKILNQMINVVNALIEKNSERDAEGKITKYFHFDEIRIELARELKKNAQKRYEMTQNINKAKLEHQKISEILQKEFGIKNPTKSDIIRYRLYQELEHNGYKELYTNAPIARDMLFSKNIEIEHIVPKARVFDDSFSNKTLTFHRINSDKGEYTAFDYITSLNSEEELNQYLTRVENAYKTKSISPTKYKNLLKKASEIGDDFINRDLRDTQYIAKKAKEILFQVTKNVLSTSGSITDRLREDWGLVDVMKELNMPKYQSLGLTEVEERKDGNKVTVIKNWTKRNDHRHHAMDALTVAFTKPSYIQYLNHLNARKDENNKNYSVILAIEEKETIKVPTNNGKNKRVFIEPIPNFRQVAKKHLEEIFISHKAKNKVVTKNTNKPAGTDKQQITLTPRGQLHKETIYGKYQYYINKEEKIGVKFDERTIAKVSNPVYREALLKRLQANDNDPKKAFAGKNALSKNPIYLDESKTKTLPEKVNLTYLEEDFSIRKDISPDNFKDLKSIEKVIDQGVKRILIKRLQAYDNDPKKAFVDLEKNPIWLNKEKGIAIKRVTISGVNNAQPLHIGKDHLGKTTLNKEGKEIPVDYVSTGNNHHVAIYRDKEGNLQEQIVSFFDAVVRAQQGIPIIDKTYKQAEGWQFLFTMKQNEMFVFPNATTGFNPAEIDLLDPKNKKLISPNLFRVQKIATKDYFFRHHLETNVETDNILKNVTWKREGLSGLKDIVKVRINHLGDIVSIGEY

SEQ ID NO: 117 - protein, 1424 aa, Parabacteroides sp.
MKRILGLDLGTNSIGWALVNEAETDEEVSSIIRLGVRVNPLTVDETQNFEKGKSITTNAERTLKRSMRRNLQRYKLRRDALVEFLKELGFITDETILSEQGNRTTFETCRLRAKAAEEEISLEELSRVLLMINKKRGYKSSRKVKKEEDGVLIDGMEIAKKLYEEDLTPGQLCSQLLESGKKVLPDFYRSDLQEELDRIWSVQKQFHPDVFCDAAKEEIKGKNRSQTWAILANYFVWKEEVVGWNDREAKNETIEKECKLVGLKRTTKGYELKKENYRWRAQALTEQLGLEEIAVVLQEINGQINASSGYLGAISDRSKVLYFNHQTVGQYQMAELDKNPHASLRNMVFYRQDYLDEFDRIWEKQAEFHKELTAELKKEIRDMIIFYQRRLKSQKGLISFCEFERLEIVVEKDGKKQTKVIGCKVIPRSHPLFQEFKVWQTLNDIKVLGREKKRNALSASESRALYPEEKEILARELAIKENMKKADVLKLLFENPQELDLNFKQIDGNRTGFSLFSAYSKMIEKYGYEPLDFKKPADEIIGQLRTIFTDLGWNTNLFTIDLTKEGKELEMQPYFRLWHLLYSFEGDNTSTGNGKLIEKIMQLCGVEKEYAVELASLSFQDDYGSLSAKAIKRILPYLKEGNLYDVACEYAGYRHSKSSLTKEEIENKVLKGKLEVLPKNSLRNPVVEKILSQMVNVINTIIDTYGKPDEIRVELARELKKSAKEREELTKAIAKSTREHEEIRKLLQDEFGMMNVSRNDIIRYKLYEELKDNGYKTLYSNQYIPKEKIFSKEIDIEHIIPQSRLFDDSLSNKTLEYKAINIEKGNKTAYDFVKEKYGEEGLQQYINRCESLFNDKKAKLRKLKMEQKDIPDGFIDRDLRNTQYIAKKALAMLNEICRRVVATTGSITDQLREDWQLVDVMKELNLPKYEALGFVETYEDKDGRKIKRIKDWTKRNDHRHHAMDALTVAFTKDAFIQYFNNKNAAQDSGNRNHTNIIGIKTRYFDKGRALPPIPLEQFRIEAKQHLEKLLVSIKAKNKVVTVNVNRTKKRKGENTKIQQTPRGQLHLETVYGSHKQYVTKIEKVNASFDAAKIATVSKRAYRNALLKRLETFGNDPKKAFTGKNALEKNPLYADKYQTIRVPEKVQTVEFETIYTIRKPVDPALNVDKVVDVKVRAILERRLKEYGGDPKKAFVNFWENPIWLNKEKGISIKRVSIRGINNAQSIHVKKDKNGNPIWDENGKQIPVDFVNTGNNHHVAIYRKPVLDKKGQVTFDEDGNLMYELDEVVVPFFEAVTRANLGLPIIDKDYRKSEGWQFLFSMKQNEYFVFPNEKTGFNPKEVDLLNPDNYAMISPNLFRVQTMSKVMYGNNVVRDYKFRHHLETTVKDMKELKDIAYKQYKTLSFGNSVVKIRINHIGQIVSVGEY

SEQ ID NO: 118 - protein, 1395 aa, Lactobacillus jensenii
MKEIKDYIIGLDIGTNSCGYVVTDKQNNILKLKGKTAIGARLFKEGQAAADRRSFRTTRRRLARRHWRLGLLEEIFDPEMEKIDPNFFRRLKESDYSPKDSRKQFNAIVFKSIKADKRFYKKYPTIYHLRNALMHDNQKHDLREIFMAVHHIVKYRGNFLREDSVNAFKAAKFSLRGEDGIGPVDKLNDLLKEIYSEYSPELATNNLSKIEDIIKDKNLYKQDKLKQVATLLIKEADSKDKAKLNKDIAKQVANSFMGYMFRLDTLFSLTDVDVKDYKLKFSDANIDESLDDLTSLLTDAQIEFVLELQSIYNTIVLNEIVPDGMSLSESMIKKYDDHKEDLKIFKEYIDSLSDQKKAKKLLSAYNLYVNYRKSDLVEAKNLFKNKKVGDKNFADVISNFEVFGKFVSDNLDDSELANKIKARLDLGEFLPKQRTNQNGVIPYQLHQVELTQILEKQGKYYPFLITPNPVESHRNNAPYEISELVSFRVPYYVGPLIDNQSIKDKQNKNKFAWMVRQKQGQITPWNLEEMVDTTESANQFIKRMTRKDTYLLAEDVLPKSSLVYQKFMILDELNRIKIDGKKLTSELKHDIFEKLFKKQKSINLDNLKNYLLVEGNIPGLIEGLSDGINFNNSFSTYIDYRNIFGDEIDNPNKQADFEKMIEWSTVFEDRKIFKRKLKEITWLTSEQIKQVSSKRYSGWGRLSKKLLTQITDENGVNILQRLWNEPETLTEVLANPVIKRKIVEANSSFTKAKDMKDILVEAYTSPQNKKAIRQVMRVVDDIIAAAHGKKPSQIAIEFAREDQDNPQMTKSRKAQLDQIYAKISDEFLDDAVKNELKNMKDNKPLAKDKVFLYFKQMGRDAYSGEKLSLDNLQDYDIDHIYPQSFIKDDSFDNRVLVQRAYNNGKSDNVPVLLFGNKIAAGLGITIRQMWKKWLELGLISKRKFNNLITDPEKISRNMASGFVNRQLVETSQVIKLVANILQAKLPDTEIIEVKASYNSILRKEFNLYKSREVNDYHHAIDAYLTTIVGNYLYQVYPKLRPYFVYGQFKKFGKAENQEDDPVKKIKKFNFIYQLIWGKDDAICISHTNQQVFSKKDIIDKLTTAYNFKYMNISHAVYTRNNNMFKQTLFPIIERTTAKTKSLIPKKLDRPTDIYGGYSNNNDAYLALVKVDKKRGSEYRVVGIPMRAAAMLKASKNYDEDLRKVIEPMVMFDKNGKAKRGIEGFRVLVGKMPFKQAVLDGNKKFMLTGTVDTPNLKQLVLSQQNMKYILDYIEDVDCRKHKFGDKVQNPDKCLLEVFDEIIEIVDKYFELFDSRDFREKLRNSRNKFIKLEASKKADTILAILKGLQAKSTRATIKELNISDFGRIITSSISPEAQLIYQSPTGLFERRVKVKDL

SEQ ID NO: 119 - protein, 1140 aa, Roseburia intestinalis
MRENGSDERRRNMDEKMDYRIGLDIGIASVGWAVLQNNSDDEPVRIVDLGVRIFDTAEIPKTGESLAGPRRAARTTRRRLRRRKHRLDRIKWLFENQGLINIDDFLKRYNMAGLPDVYQLRYEALDRKLTDEELAQVLLHIAKHRGFRSTRKAETAAKENGAVLKATDENQKRMQEKGYRTVGEMIYLDEAFRTGCSWSEKGYILTPRNKAENYQHTMLRAMLVEEVKEIFSSQRRLGNEKATEELEEKYLEIMTSQRSFDLGPGMQPDGKPSPYAMEGFSDRVGKCTFLGDQGELRGAKGTYTAEYFVALQKINHTKLVNQDGETRNFTEEERRALTLLLFTQKEVKYAAVRKKLGLPEDILFYNLNYKKAATKEEQQKENQNTEKAKFIGMPYYHDYKKCLEERVKYLTENEVRDLFDEIGMILTCYKNDDSRTERLAKLGLVPIEMEGLLAYTPTKFQHLSMKAMRNIIPFLEKGMTYDKACEEAGYDFKADSKGTKQKLLTGENVNQTINEITNPVVKRSVSQTVKVINAIIRTYGSPQAINIELAREMSKTFEERRKIKGDMEKRQKNNEDVKKQIQELGKLSPTGQDILKYRLWQEQQGICMYSGKTIPLEELFKPGYDIDHILPYSITFDDSFRNKVLVTSQENRQKGNRTPYEYMGNDEQRWNEFETRVKTTIRDYKKQQKLLKKHFSEEERSEFKERNLTDTKYITTVIYNMIRQNLEMAPLNRPEKKKQVRAVNGAITAYLRKRWGLPQKNRETDTHHAMDAVVIACCTDGMIQKISRYTKVRERCYSKGTEFVDAETGEIFRPEDYSRAEWDEIFGVHIPKPWETFRAELDVRMGDDPKGFLDTHSDVALELDYPEYIYENLRPIFVSRMPNHKVTGAAHADTIRSPRHFKDEGIVLTKTALTDLKLDKDGEIDGYYNPQSDLLLYEALKKQLLLYGNDAKKAFAQDFHKPKADGTEGPVVRKVKIQKKQTMGVFVDSGNGIAENGGMVRIDVFRVNGKYYFVPVYTADVVKKVLPNRASTAHKPYGEWKVMEDKDFLFSLYSRDLIHIKSKKDIPIKMVNGGMEGIKETYAYYIGADISAANIQGIAHDSRYKFRGLGIQSLDVLEKCQIDVLGHVSVVRSEKRMGFS

SEQ ID NO: 120 - protein, 992 aa, Treponema vincentii
MQKNSGEDENCGFEFLTEEEKELIKPLFFRISKPSFQFADIEKKLKGKNGFWKFNYRKDTNVSGCPVSAGLKNIFGDEASAESWKDKKVGQYDMCDIWHVLFDFDDEEKLLEFAKRKLFLSDEAAKKFCAIRIQQGYANLSLKAIRKITPFLRKGYIYSTAVFLANIPFMIGRDIFLQNEKEIEDSVKNIIGTLRDKNNIIVLANRCIESAFKDKDNDFRFEEWDKALVENSAWDLFGKKKWNEYDEEKRKTIISQVSEKVEDNLKIAVGKNPNDYKYPLLRTDDLIMDYLNQKGFVVKGELYHPSDTDYNFETPVPAEDGKIYLASPRSPSVKNPVVMRALHQLRKLVNYLIKTGKIDSTTKINVELANDVNDKNQRKAIEELAKTNEKNNADARKKIEELCNEAGFKVVPTESDIKKFRLWKEQNETCPYTGKHISFTDLFGPIPKFDFEHTIPRSLSYDDSLENLTLCDSEFNRNIKKQRLPSELPDFEEINKRFLKFYEDKIDNCLRIIELNSKSGGSYEEPAVKDLRIVKKHKAQYELNYYKEKLRRFSSTEITSGFKHSQLNDTRIITKFSLSYLKGVFDHVQPVKGSMTDTFKRQWGLMERNEIKDRSNHTHHTVDALTVACINRGKFNLLSEAIKNSSDGKHLKFPKPWETFDTDVLNAVRYIIPKYFSDESSLRQSKKILRGRDGKPVLKNGKAVFIQGATARGSLHKDTFYGCIKTVPEKGGKSEMIFVQRIPVSTLDEKVAEKIIDKRIRKTFEKNLSTGIQTLQEIQTDGILLPFKKEGRDVFVKRVRIKAHPTSPIILKKHHNVINKNPKDYKQNYYVENEENYLLAIYRGKDAKGKDVSDHKLCNLLNAVKSRQNKTGFYPDFKEKKGINLQLYKVLKIGKIVILQNDIQEDVFALPKEKLWKRMYRIAGLATSRNDIQIKLVHIIRETPWGYMKGEKDLNAGKECLLYGTANFKGLVEGQDFTVSPAGEIIQKARVC

SEQ ID NO: 121 - protein, 1340 aa, Enterococcus faecium
MKKEYTIGLDIGTNSVGWSVLTDDYRLVSKKMKVAGNTEKSSTKKNFWGVRLFDEGQTAEARRSKRTARRRLARRRQRILELQKIFAPEILKIDEHFFARLNESFLVPDEKKQSRHPVFATIKQEKSYHQTYPTIYHLRQALADSSEKADIRLVYLAMAHLLKYRGHFLIEGELNTENSSVTETFRQFLSTYNQQFSEAGDKQTEKLDEAVDCSFVFTEKMSKTKKAETLLKYFPHEKSNGYLSQFIKLMVGNQGNFKNVFGLEEEAKLQFSKETYEEDLEELLEKIGDDYIDLFVQAKNVYDAVLLSEILSDSTKNTRAKLSAGMIRRYDAHKEDLVLLKRFVKENLPKKYRAFFGDNSVNGYAGYIEGHATQEAFYKFVKKELTGIRGSEVFLTKIEQENFLRKQRTFDNGVIPHQIHLSELRAIIANQKKHYPFLKEEQEKLESLLTFKIPYYVGPLAKKQENSPFAWLIRKSEEKIKPWNLPEIVDMEGSAVRFIERMINTDMYMPHNKVLPKNSLLYQKFSIYNELTKVRYQDERGQMNYFSSIEKKEIFHELFEKNRKVTKKDLQEFLYLKYDIKHAELSGIEKAFNASYTTYHDFLTMSENKREMKQWLEDPELASMFEEIIKTLTVFEDREMIKTRLSHHEATLGKHIIKKLTKKHYTGWGRLSKELIQGIRDKQSNKTILDYLINDDDFPHHRNRNFMQLINDDSLSFKKEIKKAQMITDTENLEEIVKELTGSPAIKKGILQSLKIVDEIVGIMGYEPANIVVEMARENQTTGRGLKSSRPRLKALEESLKDFGSQLLKEYPTDNSSLQKDRLYLYYLQNGRDMYTGAPLDIHRLSDYDIDHIIPRSFTTDNSIDNKVLVSSKENRLKKDDVPSEKVVKKMRSFWYDLYSSKLISKRKLDNLTKIKLTEEDKAGFIKRQLVETRQITKHVAGILHHRFNKAEDTNDPIRKVRIITLKSALVSQFRNRFGIYKVREINEYHHAHDAYLNGVVALALLKKYPQLAPEFVYGEYLKFNAHKANKATVKKEFYSNIMKFFESDTPVCDENGEIFWDKSKSIAQVKKVINHHHMNIVKKTEIQKGGFSKETVEPKKDSSKLLPRKNNWDPAKYGGLGSPNVAYTVAFTYEKGKARKRTNALEGITIMEREAFEQSPVLFLKNKGYEQAEIEMKLPKYALFELENGRKRMVASNKEAQKANSFLLPEHLVTLLYHAKQYDEISHKESFDYVNEHHKEFSEVFARVLEFAGKYTLAEKNIEKLEKIYKENQTDDLAKLASSFVNLMQFNAMGAPADFKFFDVTIPRKRYTSLTEIWQSTIIHQSITGLYETRIRMGK

SEQ ID NO: 122 - protein, 1363 aa, Lactobacillus rhamnosus
MTKLNQPYGIGLDIGSNSIGFAVVDANSHLLRLKGETAIGARLFREGQSAADRRGSRTTRRRLSRTRWRLSFLRDFFAPHITKIDPDFFLRQKYSEISPKDKDRFKYEKRLFNDRTDAEFYEDYPSMYHLRLHLMTHTHKADPREIFLAIHHILKSRGHFLTPGAAKDFNTDKVDLEDIFPALTEAYAQVYPDLELTFDLAKADDFKAKLLDEQATPSDTQKALVNLLLSSDGEKEIVKKRKQVLTEFAKAITGLKTKFNLALGTEVDEADASNWQFSMGQLDDKWSNIETSMTDQGTEIFEQIQELYRARLLNGIVPAGMSLSQAKVADYGQHKEDLELFKTYLKKLNDHELAKTIRGLYDRYINGDDAKPFLREDFVKALTKEVTAHPNEVSEQLLNRMGQANFMLKQRTKANGAIPIQLQQRELDQIIANQSKYYDWLAAPNPVEAHRWKMPYQLDELLNFHIPYYVGPLITPKQQAESGENVFAWMVRKDPSGNITPYNFDEKVDREASANTFIQRMKTTDTYLIGEDVLPKQSLLYQKYEVLNELNNVRINNECLGTDQKQRLIREVFERHSSVTIKQVADNLVAHGDFARRPEIRGLADEKRFLSSLSTYHQLKEILHEAIDDPTKLLDIENIITWSTVFEDHTIFETKLAEIEWLDPKKINELSGIRYRGWGQFSRKLLDGLKLGNGHTVIQELMLSNHNLMQILADETLKETMTELNQDKLKTDDIEDVINDAYTSPSNKKALRQVLRVVEDIKHAANGQDPSWLFIETADGTGTAGKRTQSRQKQIQTVYANAAQELIDSAVRGELEDKIADKASFTDRLVLYFMQGGRDIYTGAPLNIDQLSHYDIDHILPQSLIKDDSLDNRVLVNATINREKNNVFASTLFAGKMKATWRKWHEAGLISGRKLRNLMLRPDEIDKFAKGFVARQLVETRQIIKLTEQIAAAQYPNTKIIAVKAGLSHQLREELDFPKNRDVNHYHHAFDAFLAARIGTYLLKRYPKLAPFFTYGEFAKVDVKKFREFNFIGALTHAKKNIIAKDTGEIVWDKERDIRELDRIYNFKRMLITHEVYFETADLFKQTIYAAKDSKERGGSKQLIPKKQGYPTQVYGGYTQESGSYNALVRVAEADTTAYQVIKISAQNASKIASANLKSREKGKQLLNEIVVKQLAKRRKNWKPSANSFKIVIPRFGMGTLFQNAKYGLFMVNSDTYYRNYQELWLSRENQKLLKKLFSIKYEKTQMNHDALQVYKAIIDQVEKFFKLYDINQFRAKLSDAIERFEKLPINTDGNKIGKTETLRQILIGLQANGTRSNVKNLGIKTDLGLLQVGSGIKLDKDTQIVYQSPSGLFKRRIPLADL

SEQ ID NO: 123 - protein, 1234 aa, Prevotella tannerae
MPNFWSIFTENLQTYLMKTRILGLDTGTNSLGWAVVDRDENNQYTPICRGDLIFTEGVKQEKGIEFSLAAERTSYRASRRHYFRRRLRKVEVLKVLVKHKLCPPLSDEALNRWHTKKEYPLDEDFILWQRTNEADNKNPYHDRHICLHRKLNLKDSQTDRYTLGRALYHLTQRRGFLSNRLDQNEEAEETGKVKSAISELSKEMKEAGCEFLGDYFYLLYRTEGNRVRIRSRYTDREKHYLQEFKEICRVQELDEDLAKALEKTIFFQRPLKSQRQGVGKCTMEKGHSRCAVSHPLYEEYRLLCYLNNIRIKTPSDDRLRPLNAEEREKITPLFYKEKNFDFEKIAKKLAGKTPFGWIRDAEDWPYQFNYRMTQEAPACPTTAQLIKVFGEDWKAALAETYTMSAKQDGTLKTEDEICTDIWNVLYSFSSKEKLKEFGLKKLQLDEVQAKAFSEIRLTRDFASLSLKAIRKILFFLRTGEDYSKAIFLANIPTIVGEEIWNDIERRSRLLYKVDLALRPQEERDAEEHRTIAERIKAAVAAEVPDAPIDLLYHPSMIEAYPDAKRNERFDCYQLGSPKTNAVRNPMAMRSLHMVRKVINHLLRKHIIDEKTEIHIEYARELNDANKRQAIADWQRELSKRHTAYAQNIRQLYKAETGLVIEPTKADILKYQLWEEQQHVCLYTGKKIGIADFLGANPKFDIEHTIPRSRGGDSTQENLTLCESKFNRDIKRDKLPTELANYEEILARIEHWKKQCYALKLKRDGIRTHSGLEKSIKDSRIRRRHLVGLEYGYLKGKYDRFTMKEVPEGFSRRQGAGIGLISKYAGLFLKSLFKDPKNPNRSNVYVVKGAITAEFRKLWGLQQADEAKSRENHTHHCIDAYTIACIGPCEYAALAAYYRSDEEFKYGRRREKPQFEKPWPTFTEDLLKLQEELLIVHQTTDKLGKRDRRKVKTPRGKFLTGGDSARGRLHQETYYGAINYDGNIKYVVRKPLDSLTEKDLDKIVDETVMGIVKGAVEAKGSLKEALADGIYMNKEKGILIKRVRIFSDVSEPINLKQLRDVSTKEYKRHIHLRKDENYLFAIYEGIDKKKNKKQTETATVDYLDAAKFYKDSKRRDKANSLVGDYSKKNKLPLKCILKKRQMVLFYEHSPEEIRFKDKKDLSRRLYIVTSIAKDGRVKFLHHQAATATGIQSSPSPFTNDGEHQPYYRLSASNIKVLVAGIDFDINILGEITPKL

SEQ ID NO: 124 - protein, 1496 aa, Prevotella veroralis
MKTILGLDLGTNSIGWAKVCVDDNGNYLRDIKLGSRIIPMSQDVLGNFDKGVTESQTSVRTGFRGVRRIRERSLLRRERLHRVLHVLGYLPPHYDSAIGWNKNEPSTYGKFLNHGEPKLAWEHKEDGSMRFLFMESFHEMMADFAKSQPSLVSDGKKIPLDWTIYYLRKKALSQPIRKEELAWLLLNFNQKRGYYQLRGEEDDDNPTKCEEYYELKVVGIEADEEGKNGNTWYNVKLENGWIYRRQSKIPLDDWIGKVREFIVTTEYEKDGITLKKDKNGDVKRSFRSPSEDDWGLRKKRTEKLLDSSKMTVGAFVYDHLLAEPSDKIRGKFIRTIERKYYKKELYAILCEQSKYHEELRSGDYLNKCAEELYKNNQPHRNSLLTKDLAYLLLEDLIFYQRPLKTKKSLIAECPYEAYKYVDKETGEIKRQGIKCIAKSNPYYQEFRLWQFISNLRLFNKADDKEVTADYLPTQDDYVRLFAYLNDRKEINQETLLKEFFKLKKITVNSEKVFPIRWNYIEDKEKKYPCNETRHELLLALDRARIDHSWLEKPGQEYRLWHLLYSVESKEETKEALRKLKDDDAFVESFLKVKPFKREYGAYSEKAIKKLLAVMRMGSLWRETDICDTTKGNITKILQGEIDEKLKEKISASVSSYNQLSDFQGLPVWLACYVVYGRHSEAAEIQHWKTPESLLAYINGFKQHSLRNPIVEQCILETLRTVHDIWKEVGHIDEIHVELGRNMKSTADQRARISENVLRNENTNLRIKSLLLELKNDPNIKDVRPYSPMQQEKLRIYEEGVLQELTKDDKDFTEITKISTMAQPSAKELQRYKLWLEQKYRSPYTGKSISLTKLFTSAYQIEHVIPQSRYFDDSFSNKVICESEVNSLKDNMLGYEFIKNHGGEIIHCTMLGDVKVLSESEYKAFVNDHYAHNKRKRENLLLEDIPQEFLNRQMNDSRYISKVVKALLSNIVRAEGEEEATSKFVVSCSGGITDRLKKDWGLNDVWNKIVYPRFERLNRLTGTEAFGQWENKDGKRVFQTAVPLELQRGFNKKRIDHRHHAMDALVIACTSRNIINYLNNESANNPKKREDLRQKLCDKNRTIRKPWETFTQDATAALEDVIVSFKNYVRIINKATNYYERYDVEGKKVIAEQRGDDMWAIRKPMHEATYYGRVNLRRKKKVNLRVALENISSICDNKLRIYINGLVEKGFNTKQILDKFKNTNDHFSMQKIDKVEIWQFTNEEEKLVATRKPLDTSFDTKKIASITDTGIQTILLNYLETKGGDSTIAFTPEGIVEMNQNISKYNNGKEHMPILKVRLYTKLGKKIPVGQTGCKAKQFVIAEAGTNLYFAIYEDEEGKRSYRTIPLNEVVERLKQGLSPVPEKNDKDVHLKFYLSPNDLVYVPIEDEHESLAKDHIYKFVDSSGTTANFIPHRSANVIFELNKKDAEKFCSGSIIQNEYGVGSSQSKNQKAITGEMIKAVCRKLEVDRLGNVIKVI

SEQ ID NO: 125 - protein, 1082 aa, Neisseria cinerea
MAAFKPNPMNYILGLDIGIASVGWAIVEIDEEENPIRLIDLGVRVFERAEVPKTGDSLAAARRLARSVRRLTRRRAHRLLRARRLLKREGVLQAADFDENGLIKSLPNTPWQLRAAALDRKLTPLEWSAVLLHLIKHRGYLSQRKNEGETADKELGALLKGVADNTHALQTGDFRTPAELALNKFEKESGHIRNQRGDYSHTFNRKDLQAELNLLFEKQKEFGNPHVSDGLKEGIETLLMTQRPALSGDAVQKMLGHCTFEPTEPKAAKNTYTAERFVWLTKLNNLRILEQGSERPLTDTERATLMDEPYRKSKLTYAQARKLLDLDDTAFFKGLRYGKDNAEASTLMEMKAYHAISRALEKEGLKDKKSPLNLSPELQDEIGTAFSLFKTDEDITGRLKDRVQPEILEALLKHISFDKFVQISLKALRRIVPLMEQGNRYDEACTEIYGDHYGKKNTEEKIYLPPIPADEIRNPVVLRALSQARKVINGVVRRYGSPARIHIETAREVGKSFKDRKEIEKRQEENRKDREKSAAKFREYFPNFVGEPKSKDILKLRLYEQQHGKCLYSGKEINLGRLNEKGYVEIDHALPFSRTWDDSFNNKVLALGSENQNKGNQTPYEYFNGKDNSREWQEFKARVETSRFPRSKKQRILLQKFDEDGFKERNLNDTRYINRFLCQFVADHMLLTGKGKRRVFASNGQITNLLRGFWGLRKVRAENDRHHALDAVVVACSTIAMQQKITRFVRYKEMNAFDGKTIDKETGEVLHQKAHFPQPWEFFAQEVMIRVFGKPDGKPEFEEADTPEKLRTLLAEKLSSRPEAVHKYVTPLFISRAPNRKMSGQGHMETVKSAKRLDEGISVLRVPLTQLKLKDLEKMVNREREPKLYEALKARLEAHKDDPAKAFAEPFYKYDKAGNRTQQVKAVRVEQVQKTGVWVHNHNGIADNATIVRVDVFEKGGKYYLVPIYSWQVAKGILPDRAVVQGKDEEDWTVMDDSFEFKFVLYANDLIKLTAKKNEFLGYFVSLNRATGAIDIRTHDTDSTKGKNGIFQSVGVKTALSFQKYQIDELGKEIRPCRLKKRPPVR

SEQ ID NO: 126 - protein, 1512 aa, Fibrobacter succinogenes
MKKILGLDLGTNSIGWAVVNADEITRDDGSRYLKPNGISAAGSRIIPMSADILGDFEKGNSISQTAERTRMRMARRLHERALLRRERLLRVLNLLDFLPKHFADKIDRYGKFTDDSEPKLAWRKNTEGKYEFIFQDAFNEMLAEFKDKQPEIVEEGKKIPYDWTIYYLRKKALEKALSKEELSWILLQFNQKRGYYQLRGEEEEIPQDKKIEYLAQKVVKVEATDQKKGDDVWYNVYLENGMIYRRTSKAPLDWEGKVKEFIVTTEVENDGETPKKDKEGNIKRSFRAPKEDDWTLLKKKTEADIENSHKTVGCYIYDSLLNNPKQKIIGKLVRTVERKFYKEELTQILKKQVELIPELRDDNLYKQCIEELYPINEAHRNTIAKTDFANLFINDILFYQRPLKSKKSQIDNCPYEERIFIDSKTGEKKKVPVKCIAKSNPLFQEFRLWQFIQNLRIYQREKEIDGKLLTDIDITSECLKSEEDYVRLFDWLNDRETIEQEDLLKHLFNTKKSKNKENPYRWNYVEDKVYPCNETRATILKGFSKCGINASVLSPELEMALWHILYSVEDKKEIETALTHFAQKQGWNDDFAKVFSKAKPFKKDYGSYSEKAIKKLLSLMRMGKYWNQDNIDKNTLDRIDKIINGEYDEKISNRVRDNAINLKDISDFRGLPVWLACYIVYDRHSEAKDCTKWNSPEEIDSYLKKFKQHSLRNPIVEQVVTETLRTVRDIWIQEEQIDEIHLELGRDLKNPADKRKKMSENILKNENTNLRIKAMLMEFMNPSMGIENVRPYSPSQQDILRIYEENALDNLTKDDKDFDFISKISKQAQPSKTDIIRYKCWLEQKYRSPYTGKTISLSKLFTPAYEIEHVIPQSLYFDDSFSNKVICEAEVNKLKDRQLGYKFIAEHHGEKVQLSQGEVVEILSVDAYEKFVKENYANNRIKMKKLLMESIPDEFIERQLNDSRYISKVVKGLLSNIVREKIDDENYEPEAVSKNLISCNGAITDRLKKDWGMNDVWNSIILPRFIRMNQITGKDCFTTTNAEGHLIPQMPLELQKGFNKKRIDHRHHAMDAIVIACTTRDHVNLLNNEAAHSKFNATRYQLQRKLRRFEKAVIDGKEREVAKEFLKPWDSFSSDSKNILENIIVSFKQNQRVINKTTNAFLHFDENGKKTFIKQGKGDSWAIRKSMHKDTVFGEINLRKVRSVSLNEAIKVPERVLNKKIKEKILELKNNKIDAKNIKKYIEENHTGGYGIDSSKIDVFYFTKETKERFFATRKTLDTSFNQAKIKDSIADSGIQKILLAHLKSKNGDAEQAFSPDGIDEMNKNIVELNNGKFHQPILKVRVYEKADKFAVGQKGNKKVKFVEAAKGTNLFFAIFEKDGKRSYLTIPLNVMIDCQKQYGNQWKNNIEAYLKEKELVEKDVKLQFILSPNDLVYLPTEGSIDKKRIYKVVSFTNNRLYAIPYAIAKSIVDKNEFTQLNKIEFTDNKESIKDACVPVIIDRLGNVIEFNGKRL

SEQ ID NO: 127 - protein, 1259 aa, Streptobacillus moniliformis
MKYILGLDLGVASIGWAVTEINEKGEPVGLIDANSVIFKPLDNDKGKLYNVERRDKRGSRRILRRKKHRVERTKMLLVNSSFLTNEEIDNLYVGKLDNIYEVRLKGLKEQLSKNEIARLMIYYCKNRGFKSNRKTEDLEILKSLGEKISEKDSDEKKLKPIIAKNTELIESKGLTPIEVIYMIRENDNSILGFKNKEGNYKFGFKRNQVIDEVRKILGTQQILSKEIVDEYIDILSSQRDFSDGPGGDSKYKIDYTKLAGKCKYTGEVRAVKSAPSYEIFTMLQKLNDIRYVKFTSEDKIEKKKLSKEVIHKLYDLVVEKNKTLTYDLIEKSIDEENIKLLNIPKLSKSKYVELRKSYFKERNDNENLTEEEINAFNEKLNNERMKQELIRNNLKAYKELKSKFKKNNIDENRIKELGGIYFLDLVAELLTYSKTDEKLEYFVENVERYSLFKEQRDIVEIIKTFPNYTKNGNLSLSLVRELNKLLMEGHDYESSLSSLNYYIDTDVDWEKFPTISEIEDSLSTKITNPNVKHILVILRKLYNTLLFKYGRPEKVHLELSRDFSNDFSTRNKIQKEQLENKVRREVAAFEMYGANKDIVAGKDRLSNDDFVRIKLWEEQNKVCMYSGRTIEKYQLTSAEVQIDHILPYSKSFDNSYSNKVLVFSNENQDKKERTPYQWLKGTEKWNEFKQRVRLNLNISNKKKENLLFEDEVVNNEFLERELHATSYSSRLALNIFQRLIPVSDEDKYDEHGNEKVKYLYNRNVIAFQGKMTSMLRNLYSLNKYTHSFESDTLDIDNKAFILKEFEINKDNLKMTAYNVNTGLEITSETKVEKNKSGEFKTIKDELLKKELDKKENLIEISDYFKDKVLFDLKIVDFEEIDTVEPEIISILYKMITALKEEVYSKNRENHLHHSLDAFLLTIMNRSMQMKLIKYNQLISVLKNKEIEIFNEEKGEYIDSKEFAEELQKQKIIDIDGNERGIKFNVNGKTHRLNLVKPYENFLDDIKNKIFDKRENNKLPYHVVKSKVSGALHAETILGESKGEITKRISVFDINYKNLGKIFDKDGSQKEIYETLVKWLEAKSKDYPKLKNGNIIKKVKIVDGNKDKLIKLGNKRYVEMGRTTVKILVLKKEAEEGLKFASIGRYKYNLLKSEKDVNISIWKDAIHFCKVRYNKLKENGYRLIHELIPGETIELELNKGNISKCLVVGFSGGKIEISSVIGDALDLINDKISTRIKERYYITVSTIKSIKKINKNILGD

SEQ ID NO: 128 - protein, 1091 aa, Mobiluncus mulieris
MDSRKYRVGIDVGTNSVGFAAVEEDDSGSPTRFLNTMVVIHDSGVDPEQKKYAITRLASAGTARRTRRLYRTRRQRLRELDDFISNELGYPLVNLENFADPYEPWKVRADLATTKLPNDELPEAMSIALRHMARHRGWRSPYQRVEALHLHAEISKEFAALKERVVEKTGDVFSDDATPAEVLVDLMGRQKVRGADGVLSGKLRQSDNANELRKIASVQGIDDETLNRIIDRVFSSKSPKGKASERVGMDALPGQGSKPRALKAMPSFQKFRVVSVICNLRIKDSGGDARPLSMEEKEKLIDYLMSSTTDDHVTWTDVADLLHVKRSQLQGTAKEGFDGERPYTRPPVNSTWSKIKDSKIKSLVALWKTGDVDVQSAIVEALSNASVLEDSRPGADIVVAYLESLDDKELESLDKVGLPAGRASYSEDSLERLTERMLRDDCDLFEARKREFNVADDWKPPADPIYAPVGNPGVDRVLKIVNRLLMAAEREWGAPTQINIEHVRSGFSSELMQREFERENERRRAQNEEAVKAILTEKGGNSRVSKYDITRYYAVKRQHCQCLYCGTPITFSDCELDHIVPRKGVGSTNTRVNLAAACRSCNRDKSNLPFAVWAGKASNFDVSIDDAVSRVKQWQRSQNEGVREFRAFQNEVISRLLKTTEDPEIDSRSLESVAWMARELHHRVEYYFQSKGAQTQVSVYRGAVTAQARKSSGLEDKVKMIGGGGKTRLDRRHHAMDAATIALMTPGISTTLSEKNNLRDAQKFTGQSETWKDYCGRTETARKHFAVWKSNMERLTDLFNDKLENDAIPVVQPLRLRLSNSKAHDDGIGKLDSKKLGSVWSLADIDRAATPQIWTALTRCDDFDPTKGLPENANRVIRAQGVKYESEDNIPVFPSNVAAIAVRDGYAEIGSTIHHARIYRIDDGKKTFYSMIRVFAVDLLKHQAEDLFTVKLPPSAISIRTCEDSLRRALSNGTAEYLGWLVPGDEIIVDTSDKAFHTGQIGDLLRNFPVNSFRLTGFPSNSRLRLKPVLLAGEGLRDDAEDSIKKILLGQGWRPAINVLFSKGKPRIVRRNSLGIERPSSNNGLPFSWEA

SEQ ID NO: 129 - protein, 872 aa, Candidatus Parvarchaeum
MLGSSRYLRYNLTSFEGKEPFLIMGYYKEYNKELSSKAQKEFNDQISEFNSYYKLGIDLGDKTGIAIVKGNKIILAKTLIDLHSQKLDKRREARRNRRTRLSRKKRLARLRSWVMRQKVGNQRLPDPYKIMHDNKYWSIYNKSNSANKKNWIDLLIHSNSLSADDFVRGLTIIFRKRGYLAFKYLSRLSDKEFEKYIDNLKPPISKYEYDEDLEELSSRVENGEIEEKKFEGLKNKLDKIDKESKDFQVKQREEVKKELEDLVDLFAKSVDNKIDKARWKRELNNLLDKKVRKIRFDNRFILKCKIKGCNKNTPKKEKVRDFELKMVLNNARSDYQISDEDLNSFRNEVINIFQKKENLKKGELKGVTIEDLRKQLNKTFNKAKIKKGIREQIRSIVFEKISGRSKFCKEHLKEFSEKPAPSDRINYGVNSAREQHDFRVLNFIDKKIFKDKLIDPSKLRYITIESPEPETEKLEKGQISEKSFETLKEKLAKETGGIDIYTGEKLKKDFEIEHIFPRARMGPSIRENEVASNLETNKEKADRTPWEWFGQDEKRWSEFEKRVTSLYSKKKISERKREILLNKSNEYPGLNPTELSRIPSTLSDFVESIRKMFVKYGYEEPQTLVQKGKPIIQVVRGRDTQALRWRWHALDSNIIPEKDRKSSFNHAEDAVIAACMPPYYLRQKIFREEAKIKRKVSNKEKEVTRPDMPTKKIAPNWSEFMKTRNEPVIEVIGKVKPSWKNSIMDQTFYKYLLKPFKDNLIKIPNVKNTYKWIGVNGQTDSLSLPSKVLSISNKKVDSSTVLLVHDKKGGKRNWVPKSIGGLLVYITPKDGPKRIVQVKPATQGLLIYRNEDGRVDAVREFINPVIEMYNNG

SEQ ID NO: 130 - protein, 1229 aa, Pediococcus acidilactici
MGDRKYNLGLDIGTSSIGFAAVDENNQPIRVKGKTAIGVRLFEEGKTAADRRGFRTTRRRLSRRRWRINLLNEIFDAHLAEVDPTFLARLKESNRSNLDPKKSFQGSLLFPERKDYQFYEEYPTIYHLRKALMEKDRKFDIREIYLAVHHIIKYRGNFLNGTPMRSFKVENIELNTLFDQLNQLYAEIVPDNELAFDLAQVADVKDVLSSTTIYKMDKKKQLVKMMLLPASNKALQSENKKIVTQFVNAILNYKFKLDVLLQVETDADWSLKLNDEGADDKLEEFTGDLDENRLEIIDLLQRLHNWFSLNEITKDGNSLSAAMVEKYENHHHHLGLLKKVIENHPDAKKAKALKETYTAYVGKTDDKTQNQDDFYKAVEKNLDDSPDAKGIKRLIQLDQFMPKQRTGQNGAIPHQLHQQELDQIIEKQSKYYPFLAEPNPNVKRRKDAPYKLDELIAFKIPYYVGPLVTPEEQAQNKENVFAWMKRKAAGPITPWNFDEKVDRMESANRFIRRMTTKDTYLFGEDVLPAESMIYQKFVVLNELNNLKINGRHLSLKDKQDVYNDLFKQQKTVSIKALQNYYVTKKKAATAPTVGGLADPKKFLSSLSTYIDFKNMFGERVNDPQFQEDLEQIVEWSTIFEDRGIFKAKLQALGWLSEKQIQQLVAKRYKGWGRLSKKLLTGLKNAEGYSILDEMWRSTENFMQIQSRPEFAALIQQANEKQFEGNDPDNVWENIENILGDAYTSPQNKKAIRQVVKVVQDIEKAVGNPPEKIAIEFTREAAANPQRTQSRLRTLEKLYESAEEVVDAGLTAELAEFKENKHVLSDKYYLYFTQLGRDVYTGDTISLDKLNDYDVDHILPQSFIKDDSLDNRVLTIRAVNNGKSDNVPAKMFGKKMGSFWRHLLDNGMISKRKYNNLITDPDNISKYAQKGFINRQLVETSQVIKLTANILNGIYDKDTEIIEVPAKMNSQMRKMFDLVKVREVNDYHHAFDAYLTIFIGNYLYKCYPKLRPYFVYDNFKKFGNKEDIGHKRFNFLGKIEREKKVVAPETGEILWSNVAPNETIKQIKKVYNYKFMIVSREITTRRAELFNQTVYPKNYRGKLIPIKEDRPTDLYGGYSGNTDAYLAIVALEDKKKGKYFKVVGIPTRAAAKLEKLKQQDSQQYLQALHEVIAPQFTKSTKKGIKKTEFEIVLDKVHYRQLVQDGPVKMMLGSSTYKYNAKQLVLSEKAL

SEQ ID NO: 131 - protein, 1398 aa, Veillonella parvula
METQASNQLISSHLKGYPIKDYFVGLDIGTSSVGWAVTNKAYELLKFRSHKMWGSRLFDEGESAVARRGFRSMRRRLERRKLRLKLLEELFADAMAQVDPTFFMRLRESKYHYEDKTTGHSSKHILFIDKNYNDQDYFKEYPTVYHLRSELMKSGTDDIRKLFLAVHHILKYRGNFLYEGATFDSNASTLDDVIKQALENITFNCFDCNSAISSIGQILMEAGKTKSDKAKAIEHLVDTYIATDTVDTSSKTQKDQVKEDKKRLKAFANLVLGLNASLIDLFGSVEELEEDLKKLQITGDTYDDKRDELAKAWSDEIYIIDDCKSVYDAIILLSIKEPGLTISESKVKAFNKHKDDLAILKSLLKSDRSIYNTMFKVDEKGLHNYVHYIKQGRTEETSCNREDFYKYTKKIVEGLSDSKDKEYILSQIELQILLPLQRIKDNGVIPYQLHLEELKAILAKCGPKFPFLNEVADGFSVAEKLIKMLEFRIPYYVGPLNTHHNVDNGGFAWAVRKASGRVTPWNFDDKIDREKSAAAFIKNLTNKCTYLLGEDVLPKSSLLYSEFMLLNELNNVRIDGKPLEKVVKEHLIEAVFKQDHKKMTKNRIEQFLKDNGYISETHKHEITGLDGEIKNDLASYRDMVRILGDGFDRSMAEEIITDITIFGESKKMLRETLRKKFASCLDDEAIKKLTKLRYRDWGRLSQKLLNGIEGCDKAGDGTPETIIILMRNFSYNLMELLGDKFSFMERIQEINAKLTEGQIVNPHDIIDDLALSPAVKRAVWQALRIVDEVAHIKKALPARIFVEVTRSNKNEKKKKDSRQKRLSDLYAAIKKDDVLLNGLNNEIFGELKSSLAKYDDAALRSKKLYLYYTQMGRCAYTGEIIELSLLNTDNYDIDHIYPRSLTKDDSFDNLVLCKRTANAQKSDAYPISEEIQKTQKPFWTFLKQQGLISERKYERLTRITPLTADDLSGFIARQLVETNQSVKAATTLLRRLYPGVDVVFVKAENVTDFRHDNNFIKVRSLNHHHHAKDAYLNIVVGNVYHERFTRNFRAFFKKNGANRTYNLAKMFNYDVNCTNAKDGKAWDVKTSMDTVKKMMDSNDVRVTKRLLEQTGALADATIYKATVAGKAKDGAYIGMKTKSSVFADVSKYGGMTKIKNAYSIIVQYTGKKGEVIKEIVPLPIYLTNRNTTDQDLINYVASIIPQAKDISIIYGKLCINQLVKVNGFYYYLGGKTNSKFCIDNAIQVIVSNEWIPYLKVLEKFNNMRKDNKDLKANVVSTRALDNKHTIEVRIVEEKNIEFFDYLVSKLKMPIYQKMKGNKAAELSEKGYGLFKKMSLEEQSIHLIELLNLLTNQKTTFEVKPLGITASRSTVGSKISNQDEFKVINESITGLYSNEVTIV

SEQ ID NO: 132 - protein, 1485 aa, Prevotella bivia
MKNILGLDLGTNSIGWAKISIDDNGKYIKDSIKLGSRIIPMSQDVLSNFSKGVTLSQTSERTSFRGARRLRERTLLRRERLHRILHLLGFLPKHYEKAIGWDRNDNKTYGKFINHAEPKLAWCKDNNGKMRFLFMDSFHDMLSEFSEKHPELLANGKKIPLDWTIYYLRKKALYKAITKEELAWILLNFNQKRGYYQLRGEEDRDSEANKKEYLELKVIGVEATGEKKGNDIWYNIHLENGWIYRRSSKNPLNDWLGKVKSFIVTTDLDADGNPKKDKDGNIKRSFRAPSEGDWTLIKKRTESLLENSGQTVGQFIYNHILEEPSAKIRGNFIRTIERKYYKDELKAILEKQKEFHHELSSESLLTECAKELYKRNIAHQEVLLKKGIIHLLLNDILFYQRPLKIKKSLIDNCPYENYKYVDKKSGDIKVKSIKCIAKSNPFFQEFRLWQFVSNLRLYRKSDDKDVTSEHLVTTDDYANLFTYLNNRKDIKQSVLLKEYFKIKKVKTINGAEYPVRWNYIDDDNKTYPCNETRYDILHALSKTELKSEWLTPERTYRLWHLLYSIESKEETKKALNKLNLSDDFTEAFLTIKPFKKEYGSYSEKAIKKLLSLMRMGYLWSEDEAIKQVGAEIEKTIEGELPDYVLQRLEKSQHNYNKISDFSGLPLWLASYIIYGRHSEAKEIIHWDNPESMMAYIKDFRQHSMRNPIVEQCVLETLRTVHDIWKEIGHIDEIHIELGREMKSTSEQRKAITQNVLHNQNTNIRIKLLLQELKNDNNITGVRPYSPMQQEILRIYEEGALQGLTKEDKDYNDILKISQTAQPTSNELTRYKLWLEQKYRSPYTGKAISLSKLFTSAYQIEHVIPQSRYFDDSLSNKVICESEVNTLKKAMLGMEFIKTCGGQKVHCTLLGDVEIYNEEDYKAFVNEHYSNNRTKRNKLLMEDIPQEFINRQLNDSRYISKMVKQLLSAIVRGQEEVEATSKFVIPCTGGITDRLKKDWGLNDIWNNLVSPRFQRMNALTGSEYFGHWENKEGKRVFQTTMPIQLQQGFSKKRIDHRHHAMDALVIACASRNIISYLNNETAQDTERRRDLRQKLCDKGGSVRKPWDSFTQDTQYALKDIIVTFKNYVRIINKATNYYEHYKTDGKKGMISQKGDELWAIRKPMHKETVFGKVNLRRPKRVSLSKAIDSVDIICNRKLKKYIKARLNEGLQKKQILNIFKELNNVWEGIDVNKIDIWEMSNDKEPMVATRKQLDTSFDEKKIRSISDTGIQKILLNYLITKNNNPELAFTPEGIQEMNSNISEYNDHKKHQPIYKVRVTEPLGAKYPIGTMGNNPKKFVEAQAGTNLYFAIYEDKEGKRNYDTIPLNIAAERLNQQLSPVPETNENNTPLKFYLSPNDLVYVPSEEERHSGNNIQLDKNRIYKMVSSTSKRCFFIHHRVAISLVDKKEFSAQNKMERSIDNEQVMIKSVCWKLITDRLGNIIKVIK

SEQ ID NO: 133 - protein, 1218 aa, Prevotella buccalis
MNKRILGLDTGTNSLGWAVVDWDEHAQSYELIKYGDVIFQEGVKIEKGIESSKAAERSGYKAIRKQYFRRRLRKIQVLKVLVKYHLCPYLSDDDLRQWHLQKQYPKSDELMLWQRTSDEEGKNPYYDRHRCLHEKLDLTVEADRYTLGRALYHLTQRRGFLSNRLDTSADNKEDGVVKSGISQLSTEMEEAGCEYLGDYFYKLYHEQGNKVRIRQRYTDRKKHYQHEFDAICEKQELSSELIEDLQRAIFFQLPLKSQRHGVGRCTFERGKPRCADSHPDYEEFRMLCFVNNIQVKGPHDLELRPLTYEEREKIEHLFFRKSKPNFDFEDIAKELAGKKNYAWIHDKEERAYKFNYRMTQGVPGCPTTAQLKSIFGDDWKTGIAETYTLIQKKNGSKSLQEMVDDVWNVLYSFSSVEKLKEFAHHKLQLDEENAEKFAKIKLSHSFAALSLKAIRKFLPFLRKGMYYTHASFFANIPTIVGKEIWNNEQSRKYIMENVGELVFNYQPKHRDVQGTIEMLIKDFLANNFELPAGATDKLYHPSMIETYPHALRNEFGILQLGSPRTNAIRNPMAMRSLHVLRRVVNQLLKESIIDENTEVHVEYARELNDANKRRAIADRQKEQDKQHKKYGDEIRKLYKEETGKDIEPTQTDVLKFQLWEEQNHYCLYTGEQIGITDFIGSNPKFDIEHTIPQSVGGDSTQMNLTLCDNRFNREVKKAKLPTELANHEEILTRIEPWKNKYEQLVKERDKQRTFAGMDKAVKDIRIQKRHKLQMEIDYWRGKYERFTMTEVPEGFSRRQGTGIGLISRYAGLYLKSLFHQADSRNKSNVYVVKGVATAEFRKMWGLQSEYEKKCRDNHSHHCMDAITIACIGKREYDLMAEYYHMEETFRQGRGSKPKFSKPWATFTEDVLNIYKNLLVVHDTPNNMPKHTKKYVQTSKGKVLAQGDTARGSLHLDTYYGAIERDGEIRYVVRRPLSSFTNPKELENIVDETVKRTIKEAIADKNFKQAIAEPIYMNEDKGILIKKVRCFANSVKQPINIRQHRDLSKKEYKQQYHVMNENNYLLAIYEGLVKNKVVREFEIVSYIEAAKYYKRSQDRNIFSSIVPTHSTKYGLPLKTKLLMGQQVLMFEENPDEIQVDNTKDLVKRLYKVVGIEKDGRIKFKHHQEARKEGLTIYSTPYKNNDDYVPIFRQSIKNINILVDGIDFNIDILGKVTLKE

SEQ ID NO: 134 - protein, 1218 aa, Prevotella timonensis
MNKRILGLDTGTNSLGWAVVDWDEHAQSYELIKYGDVIFQEGVKIEKGIESSKAAERSGYKAIRKQYFRRRLRKIQVLKVLVKYHLCPYLSDDDLRQWHLQKQYPKSDELMLWQRTSDEEGKNPYYDRHRCLHEKLDLTVEADRYTLGRALYHLTQRRGFLSNRLDTSADNKEDGVVKSGISQLSTEMEEAGCEYLGDYFYKLYDAQGNKVRIRQRYTDRNKHYQHEFDAICEKQELSSELIEDLQRAIFFQLPLKSQRHGVGRCTFERGKPRCADSHPDYEEFRMLCFVNNIQVKGPHDLELRPLTYEEREKIEPLFFRKSKPNFDFEDIAKALAGKKNYAWIHDKEERAYKFNYRMTQGVPGCPTIAQLKSIFGDDWKTGIAETYTLIQKKNGSKSLQEMVDDVWNVLYSFSSVEKLKEFAHHKLQLDEESAEKFAKIKLSHSFAALSLKAIRKFLPFLRKGMYYTHASFFANIPTIVGKEIWNKEQNRKYIMENVGELVFNYQPKHREVQGTIEMLIKDFLANNFELPAGATDKLYHPSMIETYPNAQRNEFGILQLGSPRTNAIRNPMAMRSLHILRRVVNQLLKESIIDENTEVHVEYARELNDANKRRAIADRQKEQDKQHKKYGDEIRKLYKEETGKDIEPTQTDVLKFQLWEEQNHHCLYTGEQIGITDFIGSNPKFDIEHTIPQSVGGDSTQMNLTLCDNRFNREVKKAKLPTELANHEEILTRIEPWKNKYEQLVKERDKQRTFAGMDKAVKDIRIQKRHKLQMEIDYWRGKYERFTMTEVPEGFSRRQGTGIGLISRYAGLYLKSLFHQADSRNKSNVYVVKGVATAEFRKMWGLQSEYEKKCRDNHSHHCMDAITIACIGKREYDLMAEYYRMEETFKQGRGSKPKFSKPWATFTEDVLNIYKNLLVVHDTPNNMPKHTKKYVQTSIGKVLAQGDTARGSLHLDTYYGAIERDGEIRYVVRRPLSSFTKPEELENIVDETVKRTIKEAIADKNFKQAIAEPIYMNEEKGILIKKVRCFAKSVKQPINIRQHRDLSKKEYKQQYHVMNENNYLLAIYEGLVKNKVVREFEIVSYIEAAKYYKRSQDRNIFSSIVPTHSTKYGLPLKTKLLMGQLVLMFEENPDEIQVDNTKDLVKRLYKVVGIEKDGRIKFKYHQEARKEGLPIFSTPYKNNDDYAPIFRQSINNINILVDGIDFTIDILGKVTLKE

SEQ ID NO: 135 - protein, 1487 aa, Prevotella timonensis
MKNILGLDLGSNSVGWALVKVEENGNPIGSIKMGSRIIPMSQDILGSFEKGDTVSQTAQRTLYRGKRRLIERHVLRRERLCRVLHIMNFLPAHFDRLLGWDKTDNKTYGKFIDDSEPKLAWRQNKNEMGKMEFVFMDSFHEMLSDFAKHQPQLIANGKKVPLDWTIYYLRKKALTQLISKEELAWILLNFNKKRGYYQLRGEEEEEQPTKKEEYKVLKVISVDADEGQKGNGIWYNIHLEDGGIYKKKSDIPLYDWVGKTLQLIVVTTYEKDGKTPKIFDSGKQNPSYRLPKEDDWGLVKKRTESQLQSSGKTVGAFIYDNILSKPDDKIRGNLVRTIERKYYKKELIEILQQQAKYHDELHNQNLLESCAKELYAHNDVHYNEVIKSNMINLLVNDIIFYQRPLKSKKSLIANCKYESYEYVDKETGEIKEMPIKCIAKSNPYYQEFRLWQFIHNLRLSDVVTREDVTAQYLSTPQDYCNLFTYLNDRKEIKQDILLKDFFKIKKVQIDKEKVFPIEWNYIKDATKSYPCNETRYELLSALKRAGMDKQWLDDTPNMQYRLWHLLYSVEEKEESAKALRKLYDDDKFVTSFLKIKPFNKCYGAYSEKAIKRLLTLMRMGKAWNEQAIDAKTLKCIQQIITDNVDSKLKEKIDDSRYVLHHVSDFQGLPTYLASYVIYGRHSEVTDIQCWDSPEDLLKFIRDFKQHSLRNPIVEQVILETLRVVYDIWKAEKHIDEIHVEVAREMKLTAQQRNEANLRNLNNEATNLRIKYLLEELKNDTFIKDVRPLSPIHQEKMRIYEQAVLGNLNKQDKDYDDIIKISKKEHPTNAELIRYKLWLEQRYCSPYTGKAISLSKLFTTAYEIEHIIPQSRYFDNSFNNKVICEAEVNKAKGNMLGYEFIKKQGGQKIYCTQLGKAVTILKEEAYKQFVNEHYAHNKRKRDNLLAENIPESFSSRQLNDTRYITKTIMSLLSNVVRQQSEEEATAKNLLPSSGSVTDRLKNDWGLKDVWNTIVTPRFERLNKLSGTNDFGEMKEENGNRYFQTNVPLEYEKGFKKKRIDHRHHAMDALVIACTTRNMVNYISNANANSPKQREDLRQLLCDKNRIINKPWDTFTQDALKALNDIVVSFKNNVRIINRATNRYQRYDKNGKKIIFSQKGDDMWAIRKSMHKETVFGRVNLIRKEVLPIAKALDNISAICNAQLRAYVNDLVDKHFNKKQLVAHFKSLNYKWNRQDVSKVEVWISSDNKTPMVAVRKPLDTSFDKKKIASITDTGIQTILLNYLESKGGDASVAFAPEGIQEMNSNIELYNNGKAHKPIKNVRLSEPLGAKYQVGERGAKTKKYVEADKGTNLFFAIYEDEEGKRYYYSVPLREAIERQKQKLSPVPEYNEKGVALKFYLSPNDLVYVPTEEERTMGTCHIDKARIYKMVSSTGCSCYFVPSTFAKVIVDKVELQSLNKMEKAITDECIKEVCWKLKVDRLGNIINVIK

SEQ ID NO: 136 - protein, 1138 aa, Bifidobacterium dentium
MLCRCHRRYRIGIDVGLMSVGLAAIEVDETGFPIRILNIQSVIHDGGIDPQLGKKKSISRKAISGVARRTRRMRRRKVVRLRQLDATLESLGFPIVEPDSLDTWEIWLTRAKLASSYIQDDETRKEDVSIALRHIARHRGWRNPYSNVESLFVDVAPSEQYEELRRKAEEKLGTSLSGNPTSAEIVECILKRQVGEVQLRTRSRKGVNGNAVEKEGLLPTKLMQSDNAAEIRRIFKVQRIDDETGRKLLRAVFKACSPKGSVERRVGRDALAPGLPRALKASLAFQEYRIANVLTNLVISEDGTKRKLTIAEKQRVFGFLSSNETDDITWIDVAEKLGLERRQIQGVGCLTADGEERISSTPPRNITALHIHSAKPVIREKLVAWWKAASPTVRETMVELLSNTVDIDRVREDMDYSSAVAFIDSLGDEELTALDSVDLLSGRAAYSRQTLKQLTERMLNTDDDLHEARKAVFGVDDNWKPPVDAISTSVGNPAVDRVLKIVNRYLLACQKRWRNPQSVQIEHVRESFSSVAKAKETERVQGERARYRNDLRRELCEQEGLNKIRESDIRRWESVQRQNGTCLYCGSPITFRTCEMDHIVPRKGVGSTNTRVNLAAACAACNKLKSNTAFSVWARTEGAANRKVSQRDAIERVKTFIFNKSVPPREQRAFKQAVISRLRQAESDPAIDNRSIESVAWMADELHRRIEAYFNQDADVSGNTPATQVWVFQGRVTALARKASGIEGRIHFAGEWKKTRLDRRHHAVDAAVIAMMNHSAAQTLVERDSLRLSQWITRKPETWKNYPFSEGQKKTRFKEWLDCMNALLDLLNDALDSDRVPVTRCQRMSLGNSQAHAATIRKMKRVELFSPMDADLIRRASTPALYCALTRLPEYSPEKGLPENRGREIVLNGRHIRSTETVDFFASGAAQLMVRNGSAEIGDSIHHMRIYRYRKTGAKSQEYVYGMIRVFQIDLLHASSENLFAVQLPSQSVSVRYGDKNVVQAIQEGRAEYLGHIVPNDEILISYEGVRMKDSEKIGAYANDFSGTASELAQRRHWVVVGSDVSKLALRPSYLSEEGLENSGSESERLSKQTRKVIEGKGWVVAVNILAKYHPVVIRRNALGEPRFRTNSGMPVSWRWDR

SEQ ID NO: 137 - protein, 587 aa, Neisseria subflava
MATSRSRIRSQTDAFGVVGSLVAFNQTSRLFVAKKNEGETADKELGALLKGVADNAHALQTGNFRTPAELALNKFEKESGHIRNQRGDYSHTFNRKDLQAELNLLFEKQKEFGNPHVSDGLKEGIETLLMAQRPALSGDAVQKMLGYCTFEPTEPKAAKNTYTAGRFIWLTKLNNLRILEQGSERPLTTTERATLMDEPYRKSKLTYAQARKLLGLEDTAFFKGLRYGKDNAEASTLMEMKAYHAISRALEKEGLKDKKSPLNLSPELQDEIGTAFSLFKTDEDITGRLKDRVQPEILEALLKHISFDKFVQISLKALRRIVPLMEQGKRYDEACAEIYGDHYGKKNAEEKIYLPPIPADEIRNPVVLRALSQARKVINAVVRRYGSPARIHIETAREVGKSFKDRKEIEKRQEENRKDREKAAAKFREYFPNFVGEPKSKDILKLRLYEQQHGKCLYSGKEINLGRLNEKGYIEIDHALPFSRTWDDSFNNKVLVLGSENQNKGNQTPYEYFNGKDNSREWQEFKARVETSRFPRSKKQRILLQKFDEDGIYRIGVKTALSFPKYQIDELGKEIRPCRLKKRPPVR

SEQ ID NO: 138 - protein, 1269 aa, Mycoplasma gallisepticum
MNNSIKSKPEVTIGLDLGVGSVGWAIVDNETNIIHHLGSRLFSQAKTAEDRRSFRGVRRLIRRRKYKLKRFVNLIWKYNSYFGFKNKEDILNNYQEQQKLHNTVLNLKSEALNAKIDPKALSWILHDYLKNRGHFYEDNRDFNVYPTKELAKYFDKYGYYKGIIDSKEDNDNKLEEELTKYKFSNKHWLEEVKKVLSNQTGLPEKFKEEYESLFSYVRNYSEGPGSINSVSPYGIYHLDEKEGKVVQKYNNIWDKTIGKCNIFPDEYRAPKNSPIAMIFNEINELSTIRSYSIYLTGWFINQEFKKAYLNKLLDLLIKTNGEKPIDARQFKKLREETIAESIGKETLKDVENEEKLEKEDHKWKLKGLKLNTNGKIQYNDLSSLAKFVHKLKQHLKLDFLLEDQYATLDKINFLQSLFVYLGKHLRYSNRVDSANLKEFSDSNKLFERILQKQKDGLFKLFEQTDKDDEKILAQTHSLSTKAMLLAITRMTNLDNDEDNQKNNDKGWNFEAIKNFDQKFIDITKKNNNLSLKQNKRYLDDRFINDAILSPGVKRILREATKVFNAILKQFSEEYDVTKVVIELARELSEEKELENTKNYKKLIKKNGDKISEGLKALGISEDEIKDILKSPTKSYKFLLWLQQDHIDPYSLKEIAFDDIFTKTEKFEIDHIIPYSISFDDSSSNKLLVLAESNQAKSNQTPYEFISSGNAGIKWEDYEAYCRKFKDGDSSLLDSTQRSKKFAKMMKTDTSSKYDIGFLARNLNDTRYATIVFRDALEDYANNHLVEDKPMFKVVCINGSVTSFLRKNFDDSSYAKKDRDKNIHHAVDASIISIFSNETKTLFNQLTQFADYKLFKNTDGSWKKIDPKTGVVTEVTDENWKQIRVRNQVSEIAKVIEKYIQDSNIERKARYSRKIENKTNISLFNDTVYSAKKVGYEDQIKRKNLKTLDIHESAKENKNSKVKRQFVYRKLVNVSLLNNDKLADLFAEKEDILMYRANPWVINLAEQIFNEYTENKKIKSQNVFEKYMLDLTKEFPEKFSEFLVKSMLRNKTAIIYDDKKNIVHRIKRLKMLSSELKENKLSNVIIRSKNQSGTKLSYQDTINSLALMIMRSIDPTAKKQYIRVPLNTLNLHLGDHDFDLHNMDAYLKKPKFVKYLKANEIGDEYKPWRVLTSGTLLIHKKDKKLMYISSFQNLNDVIEIKNLIETEYKENDDSDSKKKKKANRFLMTLSTILNDYILLDAKDNFDILGLSKNRIDEILNSKLGLDKIVK

SEQ ID NO: 139 - protein, 1354 aa, Prevotella melaninogenica
MADFAKYQPGMVADGRKIPLDWTLYYLRKKALTQAIRKEELAWILLNFNQKRGYYQLRGEEEEENSTKHEEYYELKVVSVEAAEEGKGGNTWYNVTLENGWIYRRQSKIELNDWVGKVRPFIVTTEYEIDGVTIKKDKNGEVKRSFRAPSENDWGLRKKRTESLLEESGKTVGAFIYNHILSEPADKIRGNFIRTIERKFYKKELEAILREQSKHQKELKDIDTLIACIKELYPNNKPHQDSLIKKDMTYLLITDLIFYQRPLKSKKSLIADCPYEYYEYVIKETGENKRQSIKCIAKSNPYYQEFRLWQFIINLRLFDRNNDKEVTSEYLSSMEDYTRLFTYLNDRKDINQETLLKDFFKQKKVKRGMEKEFPIRWNYIEDKEKKYPCNETRHELLTALGKVGIDHSWLDDKELFYRLWHLLYSVESKEEAEGALRKLVDNDDFVNAFLKIKPFKKEYGAYSEKAIKKLLAVMRMGNLWNEVDICEQTRDRIQNIIKGDIDEKIKDRMGRTFSQLSDFQGLPEWLACYVVYGQHSEATDIQRWTKPENLMAYINGFKQHSLRNPIVEQCILETLRTVHDIWKEAGHIDEIHIELGRGMKSTADQRARMSKSIMQNENTNLRIKSLLMELKNAKEFENVRPYSPMQQEILRIYEEGALQELTKEDAQYNEISKISQMAQPSANELLKYRLWLEQKYCSPYTGKPISLSKLFTSAYQIEHIIPQSRYFDDSFTNKVICEAEVNQLKSNMLGYEFIKKHGGEIVRCTMIGDVKLLDAKEYYNFVTEHYTNNRRKKEKLLMEDIPQEFLNRQMNDSRYISKKVMAILSNIVREEDEQEAKSKFVIACSGGITDRLKQDWGLNDVWNSIVYPRFERLNKLTNTENFGRWENKKGKQVFQTSVPLELQKDFSKKRIDHRHHAMDALVIACASNNIINYLNNESAKSQEKREDLRKKLCDKNRIIRKPWETFTQDAHTALENVVVSFKNYIRVINKATNYYEKYDKNGKKEIAEQKGQDMWAIRKPMHKETVFGQVNLRRKITIKLKDALEKIPAICDKELRDYINILVAKQFNKKQILAHFKSINYRLNMKSVDKVDVWQFSNEKEPMVATRKSVDTSFDTKRIATITDTGIQKILLNYLKAKNNDPNIAFTPEGIAEMNKHITEYNNGKQHQPILKVRVSEPKGAKYQVGETGNKRSKFVEAQKGTNLYFAIYEDKEGNRSYNTIPLNEVIERLKQGLSPVPDANEKSIPLKFHLSPNDLVYVPKTDEENEIKMGQIYKFVDSSGTTANFVPHRVSNLIYNVDKKIAENFCNHEIIQNEYGIGSPQSKNQKSITGEMIKAVCWKLEVDRLGNIHKIIK

SEQ ID NO: 140 - protein, 1130 aa, Streptococcus gallolyticus
MTNGKILGLDIGIASVGVGIIEAKTGKVVHANSRLFSAANAENNAERRGFRGSRRLNRRKKHRVKRVRDLFEKYEIVTDFRNLNLNPYELRVKGLTEQLTNEELFAALRTISKRRGISYLDDAEDDSTGSTDYAKSIDENRRLLKTKTPGQIQLERLEKYGQLRGNFTVYDENGEAHRLINVFSTSDYEKEARKILETQADYNKKITAEFIDDYVEILTQKRKYYHGPGNEKSRTDYGRFRTDGTTLENIFGILIGKCSFYPDEYRASKASYTAQEYNFLNDLNNLKVPTETGKLSTEQKEALVEFAKSTATLGPAKLLKEIAKILDCKVDEIKGYREDDKGKPDLHTFEPYRKLKFNLDSVNIDDLSREVLDKLADILTLNTEREGIEDAIRHNLPNQFTEGQISEIIKVRKSQSTAFNKGWHSFSAKLMNELIPELYATSDEQMTILTRLEKFKVNKKSSKNTKTIDEKEVTDEIYNPVVAKSVRQTIKIINAAVKKYGDFDKIVIEMPRDKNADDEKKFIDKRNKENKKEKDDALKRAAYLYNGTDKLPDEVFHGNKQLETKIRLWYQQGERCLYSGKPIPIQELVHNSNNFEIDHILPLSLSFDDSLANKVLVYAWTNQEKGQKTPYQVIDSMDAAWSFREMKDYVLKQKGLGKKKRDYLLTTENIDKIEVKKKFIERNLVDTRYASRVVLNSLQSALRELGKDTKISVIRGQFTSQLRRKWKIDKSRETYHHHAVDALIIAASSQLKLWEKQDNPMFVDYGNNQVVDKQTGEILSVSDDEYKELVFQPPYQGFVNMISSKGFEDEILFSYQVDSKYNRKVSDATIYSTRKAKIGKDKKEETYVLGKIKDIYSQNGFDTFIKKYNKDKTQFLMYQKDPLTWENVIEVILRDYPTTKKSEDGKNDVKCNPFEEYRRENGLVCKYSKKGKGTPIKSLKYYDKKLGNCIDITPEGSKNEVVLQSLNPWRADVYFNPETLKYELLGLKYSDLSFEKGTGKYHISQEKYDVIKEKEGIGKKSEFKFTLYRNDLILIKDTASGEQEIYRFLSRTMPNVKHYAELKPYDKEKFDNVQELVEALGEADKVGRCIKGLNKSNLSIYKVRTDVLGNKYFVKKEGDKPKLDFKNNKK

SEQ ID NO: 141 - protein, 1371 aa, Streptococcus gallolyticus
MTEKNYSIGLDIGTNSVGWAVITDDYKVPAKKMKVLGNTDKKYIKKNLLGALLFDNGETAEATRLKRTARRRYTRRKNRLRYLQEIFAEEMAKVDESFFYRLDESFLTTDDKDFERHPIFGNKADEIKYHQEFPTIYHLRKHLADSHEKADLRLIYLALAHMIKFRGHFLIEGELNAENTDVQKLFEAFVEVYDRTFDDSNLSEITVDASSILTEKFSKSRRLENLIKHYPTEKKNTLFGNLVALALGLQPNFKTSFKLSEDAKLQFSKDTYEEDLEELIGKIGDEYADLFTSAKNLYDAILLSGILTVADNTTKAPLSASMIKRYNEHQVDLKKLKEFIKNNASDKYDEIFNDKDKNGYAGYIENGVKQDEFYKYLKTTLSKIDGSDYFLDKIEREDFLRKQRTFDNGSIPHQIHLQEMHAILRRQGEHYAFLKENQAKIEKILTFRIPYYVGPLARKNSRFAWAEYHSDEKITPWNFDEIIDKEKSAEKFITRMTLNDLYLPEEKVLPKHSLVYETYTVYNELTKVKYVNEQGKSNFFDANMKQEIFEHVFKENRKVTKDKFLNYLNKEFPEYRIQDLIGLDKENKSFNASLGTYHDLKKILDKSFLDDKTNETIIEDIIQTLTLFEDRDMIRQRLQKYSDIFTPQQLKKLERRHYTGWGRLSYKLINGIRNKENGKSILDYLIDDGYANRNFMQLISDDTLPFKQIIKDAQIIGDIDDVTSVVRELPGSPAIKKGILQSVKIVDELVKVMGHNPDNIVIEMARENQTTNRGRNQSQQRLKKLQDSLKELGSNILNEEKPSYIEGKVENNHLQDDRLFLYYIQNGKDMYTGDELDIDHLSDYDIDHIIPQAFIKDDSIDNRVLTSSAKNRGKSDDVPSLDIVHDRKADWIRLYKSGLISKRKFDNLTKAERGGLTENDKAGFIKRQLVETRQITKHVAQILDSRFNTERDENDKVIRNVKVITLKSNLVSQFRKDFKFYKVREINDYHHAHDAYLNAVVGTALLKKYPKLAPEFVYGEYKKYDIRKFITSSGDKATAKYFFYSNLMNFFKRVIRYSNGKVVVRPVIECSKDTGEIAWNKQTDFEKVRRVLSYPQVNIVKKVETQTGGFSKESILPKGNSDKLIPRKTKKFRWDTPKYGGFDSPNIAYSVFVIADVEKGKAKKLKTVKELVGISIMERSSFEENPVVFLEKKGYQNVQEDNLIKLPKYSLFEFEGGRRRLLASASELQKGNEVVLSRHLVELLYHAHRVNSFNNSEHLKYVSEHKKEFGEVLSCVENFAKSYVDVEKNLGKIRAVADKIDTFSIEDISISFVNLLTLTALGAPADFNFLGEKIPRKRYTSTKECLNATLIHQSITGLYETRIDLSKLGEE

SEQ ID NO: 142 - protein, 1168 aa, Azospirillum sp.
MARPAFRAPRREHVNGWTPDPHRISKPFFILVSWHLLSRVVIDSSSGCFPGTSRDHTDKFAEWECAVQPYRLSFDLGTNSIGWGLLNLDRQGKPREIRALGSRIFSDGRDPQDKASLAVARRLARQMRRRRDRYLTRRTRLMGALVRFGLMPADPAARKRLEVAVDPYLARERATRERLEPFEIGRALFHLNQRRGYKPVRTATKPDEEAGKVKEAVERLEAAIAAAGAPTLGAWFAWRKTRGETLRARLAGKGKEAAYPFYPARRMLEAEFDTLWAEQARHHPDLLTAEAREILRHRIFHQRPLKPPPVGRCTLYPDDGRAPRALPSAQRLRLFQELASLRVIHLDLSERPLTPAERDRIVAFVQGRPPKAGRKPGKVQKSVPFEKLRGLLELPPGTGFSLESDKRPELLGDETGARIAPAFGPGWTALPLEEQDALVELLLTEAEPERAIAALTARWALDEATAAKLAGATLPDFHGRYGRRAVAELLPVLERETRGDPDGRVRPIRLDEAVKLLRGGKDHSDFSREGALLDALPYYGAVLERHVAFGTGNPADPEEKRVGRVANPTVHIALNQLRHLVNAILARHGRPEEIVIELARDLKRSAEDRRREDKRQADNQKRNEERKRLILSLGERPTPRNLLKLRLWEEQGPVENRRCPYSGETISMRMLLSEQVDIDHILPFSVSLDDSAANKVVCLREANRIKRNRSPWEAFGHDSERWAGILARAEALPKNKRWRFAPDALEKLEGEGGLRARHLNDTRHLSRLAVEYLRCVCPKVRVSPGRLTALLRRRWGIDAILAEADGPPPEVPAETLDPSPAEKNRADHRHHALDAVVIGCIDRSMVQRVQLAAASAEREAAAREDNIRRVLEGFKEEPWDGFRAELERRARTIVVSHRPEHGIGGALHKETAYGPVDPPEEGFNLVVRKPIDGLSKDEINSVRDPRLRRALIDRLAIRRRDANDPATALAKAAEDLAAQPASRGIRRVRVLKKESNPIRVEHGGNPSGPRSGGPFHKLLLAGEVHHVDVALRADGRRWVGHWVTLFEAHGGRGADGAAAPPRLGDGERFLMRLHKGDCLKLEHKGRVRVMQVVKLEPSSNSVVVVEPHQVKTDRSKHVKISCDQLRARGARRVTVDPLGRVRVHAPGARVGIGGDAGRTAMEPAEDIS

SEQ ID NO: 143 - protein, 1345 aa, Streptococcus mutans
MKKPYSIGLDIGTNSVGWAVVTDDYKVPAKKMKVLGNTDKSHIKKNLLGALLFDSGNTAADRRLKRTARRRYTRRRNRILYLQEIFAEEMSKVDDSFFHRLEDSFLVTEDKRGERHPIFGNLEEEVKYHENFPTIYHLRQYLADNPEKVDLRLVYLALAHIIKFRGHFLIEGKFDTRNNDVQRLFQEFLAVYDNTFENSSLQEQNVQVEEILTDKISKSAKKDRVLKLFPNEKSNGRFAEFLKLIVGNQADFKKHFELEEKAPLQFSKDTYEEELEVLLAQIGDNYAELFLSAKKLYDSILLSGILTVTDVSTKAPLSASMIQRYNEHQMDLAQLKQFIRQKLSDKYNEVFSDVSKDGYAGYIDGKTNQEAFYKYLKGLLNKIEGSGYFLDKIEREDFLRKQRTFDNGSIPHQIHLQEMRAIIRRQAEFYPFLADNQDRIEKILTFRIPYYVGPLARGKSDFAWLSRKSADKITPWNFDEIVDKESSAEAFINRMTNYDLYLPNQKVLPKHSLLYEKFTVYNELTKVKYKTEQGKTAFFDANMKQEIFDGVFKVYRKVTKDKLMDFLEKEFDEFRIVDLTGLDKENKAFNASYGTYHDLRKILDKDFLDNSKNEKILEDIVLTLTLFEDREMIRKRLENYSDLLTKEQVKKLERRHYTGWGRLSAELIHGIRNKESRKTILDYLIDDGNSNRNFMQLINDDALSFKEEIAKAQVIGETDNLNQVVSDIAGSPAIKKGILQSLKIVDELVKIMGHQPENIVVEMARENQFTNQGRRNSQQRLKGLTDSIKEFGSQILKEHPVKHSQLQNDRLFLYYLQNGRDMYTGEELDIDYLSQYDIDHIIPQAFIKDNSIDNRVLTSSKENRGKSDDVPSKNVVRKMKSYWSKLLSAKLITQRKFDNLTKAERGGLTDDDKAGFIKRQLVETRQITKHVARILDERFHTETDENNKKIRQVKIVTLKSNLVSNFRKEFELYKVREINDYHHAHDAYLNAVIGKALLGVYPQLEPEFVYGDYPHFHGHKENKATAKKFFYSNIMNFFKKDDVRTDKNGEIIWKKDEHISNIKKVLSYPQVNIVKKVEEQTGGFSKESILPKGNSDKLIPRKTKKFYWDTKKYGGFDSPIVAYSILVIADIEKGKSKKLKTVKALVGVTIMEKMTFERDPVAFLERKGYRNVQEENIIKLPKYSLFKLENGRKRLLASARELQKGNEIVLPNHLGTLLYHAKNIHKVDEPKHLDYVDKHKDEFKELLDVVSNFSKKYTLAEGNLEKIKELYAQNNGEDLKELASSFINLLTFTAIGAPATFKFFDKNIDRKRYTSTTEILNATLIHQSITGLYETRIDLSKLGGD

SEQ ID NO: 144 - protein, 1024 aa, Helicobacter mustelae
MIRTLGIDIGIASIGWAVIEGEYTDKGLENKEIVASGVRVFTKAENPKNKESLALPRTLARSARRRNARKKGRIQQVKHYLSKALGLDLECFVQGEKLATLFQTSKDFLSPWELRERALYRVLDKEELARVILHIAKRRGYDDITYGVEDNDSGKIKKAIAENSKRIKEEQCKTIGEMMYKLYFQKSLNVRNKKESYNRCVGRSELREELKTIFQIQQELKSPWVNEELIYKLLGNPDAQSKQEREGLIFYQRPLKGFGDKIGKCSHIKKGENSPYRACKHAPSAEEFVALTKSINFLKNLTNRHGLCFSQEDMCVYLGKILQEAQKNEKGLTYSKLKLLLDLPSDFEFLGLDYSGKNPEKAVFLSLPSTFKLNKITQDRKTQDKIANILGANKDWEAILKELESLQLSKEQIQTIKDAKLNFSKHINLSLEALYHLLPLMREGKRYDEGVEILQERGIFSKPQPKNRQLLPPLSELAKEESYFDIPNPVLRRALSEFRKVVNALLEKYGGFHYFHIELTRDVCKAKSARMQLEKINKKNKSENDAASQLLEVLGLPNTYNNRLKCKLWKQQEEYCLYSGEKITIDHLKDQRALQIDHAFPLSRSLDDSQSNKVLCLTSSNQEKSNKTPYEWLGSDEKKWDMYVGRVYSSNFSPSKKRKLTQKNFKERNEEDFLARNLVDTGYIGRVTKEYIKHSLSFLPLPDGKKEHIRIISGSMTSTMRSFWGVQEKNRDHHLHHAQDAIIIACIEPSMIQKYTTYLKDKETHRLKSHQKAQILREGDHKLSLRWPMSNFKDKIQESIQNIIPSHHVSHKVTGELHQETVRTKEFYYQAFGGEEGVKKALKFGKIREINQGIVDNGAMVRVDIFKSKDKGKFYAVPIYTYDFAIGKLPNKAIVQGKKNGIIKDWLEMDENYEFCFSLFKNDCIKIQTKEMQEAVLAIYKSTNSAKATIELEHLSKYALKNEDEEKMFTDTDKEKNKTMTRESCGIQGLKVFQKVKLSVLGEVLEHKPRNRQNIALKTTPKHV

SEQ ID NO: 145 - protein, 765 aa, Butyrivibrio fibrisolvens
MGITIGLDLGVASVGWAVVNDDYEILESCSNIFPSADASKNSERRGFRQGRRLTRRRKNRIHDFQKLWEDKGFVIPSQGTEDVLAIKIKGLSEKLSVDEVYWVLLNSLKHRGISYLDDADSGDNSSDYAKSISRNEEELKEKLPCEIQWERLQKYGAYRGNISIVEDGEPITLRNVFTTSAYKKEVEQFIDTQAKYNAQYSGDFKADYLEIFNRKREYYEGPGNELSRTDYGKYTTEINADGEYITVDNIFDKLVGKCSVNPDERRAAGASYTAQEFNVLNDLNNLTISSESSFIEDGKLTEDAKRKIIETIKNAKTVNVKKIICDVIGDKKCQISGARIDKNEKEIFHSFEAYNKMRRALEEIGFDISSLSRENLDLIGDILTLNTDRESILNAFNRKGIELADEAKDILVKVRKTNGSLFNKWQSFGLSIMNELIPELYAQPKNQMELLTAMGVFKSRGDRFLECKEIPGDLIVDDIYNPVVSKTVRITVRILNALIKKYGYPDRVVIEMPRDKNSDEEQQRLKKEQRDNENEIKDIKARVKTEYGREITEEDFRQHSKLSLKLKLWNEQQGICPYSGKSIKIDDLLDNPNLFEVDHIIPLSISFDDSRNNKVLVYSSENQDKGNRTPLAYLASVNRQWDIHSFMDYVLKTYAGAQKRKKRDNLLNEQDITKVEVLQGFVNRNINDTRYASKVVLNSLQEYFSSKECSTKVKVIRGSFTHQMRVNLKLKKTVMNHMFIMQLMQCLLLFHRWDMTLIMNLQISI

SEQ ID NO: 146 - protein, 1338 aa, Coprococcus catus
MKQEYFLGLDMGTGSLGWAVTDSTYQVMRKHGKALWGTRLFESASTAEERRMFRTARRRLDRRNWRIQVLQEIFSEEISKVDPGFFLRMKESKYYPEDKRDAEGNCPELPYALFVDDNYTDKNYHKDYPTIYHLRKMLMETTEIPDIRLVYLVLHHMMKHRGHFLLSGDISQIKEFKSTFEQLIQNIQDEELEWHISLDDAAIQFVEHVLKDRNLTRSTKKSRLIKQLNAKSACEKAILNLLSGGTVKLSDIFNNKELDESERPKVSFADSGYDDYIGIVEAELAEQYYIIASAKAVYDWSVLVEILGNSVSISEAKIKVYQKHQADLKTLKKIVRQYMTKEDYKRVFVDTEEKLNNYSAYIGMTKKNGKKVDLKSKQCTQADFYDFLKKNVIKVIDHKEITQEIESEIEKENFLPKQVTKDNGVIPYQVHDYELKKILDNLGTRMPFIKENAEKIQQLFEFRIPYYVGPLNRVDDGKDGKFTWSVRKSDARIYPWNFTEVIDVEASAEKFIRRMTNKCTYLVGEDVLPKDSLVYSKFMVLNELNNLRLNGEKISVELKQRIYEELFCKYRKVTRKKLERYLVIEGIAKKGVEITGIDGDFKASLTAYHDFKERLTDVQLSQRAKEAIVLNVVLFGDDKKLLKQRLSKMYPNLTTGQLKGICSLSYQGWGRLSKTFLEEITVPAPGTGEVWNIMTALWQTNDNLMQLLSRNYGFTNEVEEFNTLKKETDLSYKTVDELYVSPAVKRQIWQTLKVVKEIQKVMGNAPKRVFVEMAREKQEGKRSDSRKKQLVELYRACKNEERDWITELNAQSDQQLRSDKLFLYYIQKGRCMYSGETIQLDELWDNTKYDIDHIYPQSKTMDDSLNNRVLVKKNYNAIKSDTYPLSLDIQKKMMSFWKMLQQQGFITKEKYVRLVRSDELSADELAGFIERQIVETRQSTKAVATILKEALPDTEIVYVKAGNVSNFRQTYELLKVREMNDLHHAKDAYLNIVVGNAYFVKFTKNAAWFIRNNPGRSYNLKRMFEFDIERSGEIAWKAGNKGSIVTVKKVMQKNNILVTRKAYEVKGGLFDQQIMKKGKGQVPIKGNDERLADIEKYGGYNKAAGTYFMLVKSLDKKGKEIRTIEFVPLYLKNQIEINHESAIQYLAQERGLNSPEILLSKIKIDTLFKVDGFKMWLSGRTGNQLIFKGANQLILSHQEAAILKGVVKYVNRKNENKDAKLSERDGMTEEKLLQLYDTFLDKLSNTVYSIRLSAQIKTLTEKRAKFIGLSNEDQCIVLNEILHMFQCQSGSANLKLIGGPGSAGILVMNNNITACKQISVINQSPTGIYEKEIDLIKL

SEQ ID NO: 147 - protein, 1035 aa, Candidatus Puniceispirillum
MRRLGLDLGTNSIGWCLLDLGDDGEPVSIFRTGARIFSDGRDPKSLGSLKATRREARLTRRRRDRFIQRQKNLINALVKYGLMPADEIQRQALAYKDPYPIRKKALDEAIDPYEMGRAIFHINQRRGFKSNRKSADNEAGVVKQSIADLEMKLGEAGARTIGEFLADRQATNDTVRARRLSGTNALYEFYPDRYMLEQEFDTLWAKQAAFNPSLYIEAARERLKEIVFFQRKLKPQEVGRCIFLSDEDRISKALPSFQRFRIYQELSNLAWIDHDGVAHRITASLALRDHLFDELEHKKKLTFKAMRAILRKQGVVDYPVGFNLESDNRDHLIGNLTSCIMRDAKKMIGSAWDRLDEEEQDSFILMLQDDQKGDDEVRSILTQQYGLSDDVAEDCLDVRLPDGHGSLSKKAIDRILPVLRDQGLIYYDAVKEAGLGEANLYDPYAALSDKLDYYGKALAGHVMGASGKFEDSDEKRYGTISNPTVHIALNQVRAVVNELIRLHGKPDEVVIEIGRDLPMGADGKRELERFQKEGRAKNERARDELKKLGHIDSRESRQKFQLWEQLAKEPVDRCCPFTGKMMSISDLFSDKVEIEHLLPFSLTLDDSMANKTVCFRQANRDKGNRAPFDAFGNSPAGYDWQEILGRSQNLPYAKRWRFLPDAMKRFEADGGFLERQLNDTRYISRYTTEYISTIIPKNKIWVVTGRLTSLLRGFWGLNSILRGHNTDDGTPAKKSRDDHRHHAIDAIVVGMTSRGLLQKVSKAARRSEDLDLTRLFEGRIDPWDGFRDEVKKHIDAIIVSHRPRKKSQGALHNDTAYGIVEHAENGASTVVHRVPITSLGKQSDIEKVRDPLIKSALLNETAGLSGKSFENAVQKWCADNSIKSLRIVETVSIIPITDKEGVAYKGYKGDGNAYMDIYQDPTSSKWKGEIVSRFDANQKGFIPSWQSQFPTARLIMRLRINDLLKLQDGEIEEIYRVQRLSGSKILMAPHTEANVDARDRDKNDTFKLTSKSPGKLQSASARKVHISPTGLIREG

SEQ ID NO: 148 - protein, 1270 aa, Mycoplasma gallisepticum
MNNSIKSKPEVTIGLDLGVGSVGWAIVDNETNIIHHLGSRLFSQAKTAEDRRSFRGVRRLIRRRKYKLKRFVNLIWKYNSYFGFKNKEDILNNYQEQQKLHNTVLNLKLEALNAKIDPKALSWILHDYLKNRGHFYEDNRDFNVYPTEELANYFDEFGYYKGIIDSKNDDDDKLEEGLTKYKFSNQHWLEEVKKVLSNQTGLPEKFKEEYESLFSYVRNYSEGPGSINSVSPYGIYHLDEKEGKVVQKYNNIWDKTIGKCSIFPDEYRAPKNSPIAMIFNEINELSTIRSYSIYLTGWFINQEFKKAYLNKLLDLLIKTNSEKPIDARQFKKLREETIAESIGKETLKDVESEEKLEKDDHKWKLKGLKLNTNGKIQYNDLSSLAKFVHKLKQHLKLDFLLEDQYTPLDKINFLQSLYVYLGKHLRYSNRVDSANLKEFSDSSRLFERVLQEQKDGLFKLFEQTDKDDEKILTQTHSLSTKAMLLAITRMTNLDNDEDNQKNNDKGWNFEAIKNFDQKFIDITKTNNNLSLKQDKRYLDDQFINDAILSPGVKRILREATKVFNAILKQFSEEYDVTKVVIELARELSEEKELENTKNYKKLIKKNGDKISEGLKALGIAEDKIEEILKSPTKSYKVLLWLQQDHIDPYSQKEIAFDDILTKTEKTEIDHIIPYSISFDDSSSNKLLVLAESNQAKSNQTPYEFINSGKAEITWEVYEAYCHKFKNGDSSLLDSTQRSKKFAKMMKTDTSSKYDIGFLARNLNDTRYATIVFRDALKDYANNHLVEDKPMFKVVCINGGVTSFLRKNFDPKSWYAKKDRDKNIHHAVDASIISIFSNETKTLFNQLTKFADYKLFKNTDGSWKKIDPKTGVVSEVTDENWKQIRVRNQVSEIAKVIDKYIQDSNIERKARYSRKIENKTNISLFNDTVYSAKKVGYEDQIKRKNLKTLDIHESAEENKNSKVKKQFVYRKLVNVSLLNNDKLADLFAEKEDILMYRANPWVINLAEQIFNEYTENKKIKSQNVFEKYMLDLTKEFPEKFSEAFVKSMIRNKTAIIYNVEKDVVHRIKRLKILSSELKENKWSNVIIRSKNESGTKLSYQDTINSIALMIMRSIDPTAKKQYIRVPLNTLNLHLGDQDFDLHNIDAYLKKPKFVKYLKANEIGDEYKPWRVLTSGTLLIHKKDKKLMYISSFQNLNDLIEIKNLIETEYKENVDSDPKKKKKASQILRSLSVILNDYILLDAKYNFDILGLSKNKIDEILNSKLDLDKIAK

SEQ ID NO: 149 - protein, 1204 aa, Prevotella ruminicola
MERILGIDTGTNSLGWAIVDKDENQYHLVAKGTNIFSEGVKIEKGIESSKAAERTEHRSVRKHYWRRKIRKIRLLTILSDNDLCPRLKHEQLRQWRLKKVYPTDDTFMEWQRTEDKAQVNPYKFRYICLTQKLDLSDITQRFILGRALYHLNQRRGFLSNRKEATKESEGTVKEGISSLSKDMKDSGCEYLGEYFYQLYQQGKKIRNHYTARKEHYLKEFKAICSKQELDDALIEKLEKAIFDQRPLKSQKGQVGTCTFEKGKSRCPSSHPLYEDFRMYSFINNIKVQVDTLYDKGERSLTDEEKQLIIPLFKRKSKRTFPFEDIAKKIAGKNNYCYIKSNEEKAYKFNYQMDTQVSGSPVNAQLEEIFGEDWLSSVCEVYTLANNKSRFQIMNDVWHVLFFYDDEDKLKEFAKDRLQLDDELAEKFSKISIPNDYAALSLKAIRKIMPYLRDYGLIYSEAVFLANLVDVLPQHVWGIKEMREAAIENVIDVMHSYDKNNIDGITLEGCVKTFLKERYQVSDDNLKKLYHPSMLDPYPRQRPNDEGVFQLGSPRISSVKNPMAMHSLFRLRKVVNLMLKKGYITPDTKVHIEFSRDLNDANKRWAIQTWQRENEKERERCRKEIEKYIASPSDTDILKYQLWEEQNHKCLYTGDEIRITDFLGDNPKYDIEHTIPRSAGGDSTKMNLTLCSSRFNRDEKKTKLPAELVNHDEILERISNWKEKYEDIDKQIRKISTKGATSKEDKDSKIRRRHYLILQRDYWRGKYQRFTMTEVPEGFSRRQGTDISVISRYARMYLKSVFKQVYIVKGIATSDFRKMWGIQDEYAKKERVNHVHHCIDAITIACIGKAEYDKLADYRHQYDDYLFQGKTKPTFDKPWPSFVIDIKHIQDELLIAHYAKDNLEKFTKKNLRGKDGRIIRDKFGNKLQMKGDTSRNSLHNDKFYGAINHEGEIKYVYRTNIEALDAKSIGNIVDPTVRSIIESAIAIHGSLKAAINKGIWMNEEKHIPIKKVRVFRNDVKKPIELKDQRDLSDKDYKQHYYVTNDGNYMMLIFSKLNNKGREIRQHVVINSLEATEVIKSHKRSQVGKVVWESYYSKEGFDLIYKLKSGTMILLYENNRDEVWDLDIRNLQKRLYIITKMKYDGRIYMMHHQEAREKKDLEEKSGSFKINEDYRPLIVNSYNQFNALVQDLDFEINDLGEIRRLI

SEQ ID NO: 150 - protein, 1178 aa, Scardovia inopinata
MGKRHNSNMAKKKISYRIGIDVGLNSTGLAAIEVDDDGAPIRILNTMSVIHDGGVDPDAAKVRGTRLAISGIARRTRRMRRRRAKRLDRLEQILEKYGYTDTEPVLEEPYGPWICRAELADGFINDDEQRRMMIGIAIRHIARHRGWRNPYQNVRALLNIDDSDLSEEYKNLKEKVQDQINDGKDLPNFTPSQLVRDYLDNFSGQPAARIRTGKAGPRGNRRDAVGILPQRMRQSDYAYELQRIFDMQKIGRDEAQELLMAVFEAKSPKGSAEKRIGKDPLTGKKRALKASLAFQKYRIVATITNLRIKTGTGSERMLSPTELNDIYTYLLRVQDDNHLPTWEDICEEVLHIGRYQLAGIGKTFEGGERISNMPPVIQTSLAIHGLSEGTLAEKLTKWWDKADDDSRESMIKLLSNTVDIDRVNEVDENFASALDFIDSLDDEELTKLDKIALPRGRAAYSEEALNKLTADMLNTGDDLFSARQRIYHVNNSWRPPQPPIGEPLGNPAVDRVLKITNRYLMNCLNRWGQPRRVTIEHTRSGFTSVKQATEHQKISDKRAEYRRDIVKQLEEAGVESVHEYDIRRWEAVQRQNGQCLYCGRDITFKTCEMDHIVPRKGPGSTNTRTNFAAVCPECNRMKSNIPFASWAETKEAKDRGVSLDKAIKQVRFFNFTKNEYSPQAQRNFKKSMIERLKQKTSDEPLDNRSIESVSWMADELYKRIDWYFNHEQYETSKKAINDDKDNLSGTQVVVYPGSITAEARNAAGLGGNIHFIGGRYKTRLDRRHHAVDACVIAMMEPGIARILTERNQLRQAQRLTARIEDDEVNWKDYPTENTAGYNKYQAWSDRMHALLEYMNNALDYDKIPVVRWERLQLGNRSAHEDTIHPLKKLPLSHEISAIDINHASTPALYEALVSLPDFSEQDGLPADPSRQINVNGERYSGDDLVSFFNSNAAQIAIQGGSAELGTAFHHARIYRCWTVGKNGKKKIFFGMIRVYQHDLLHAKNEDLFTYPLKRSSVSMRYAKKEVVHAILSGNAEYVGYLCVGDELVLDLKGDKSNDEGGSRLSGQVGEFVQKFEEDSKVNSQIVNRWTVDGFPDEAKLRLRPSMFAGEGLKNMKSELVENAAIKNILSKTGWRVSVDVISKKSPVVLRRNAFGEPRWKTNAGLPVSYRWQDTETKE

SEQ ID NO: 151 - protein, 1371 aa, Gordonibacter pamelaeae
MNLRNVESYQVGLDIGTGSVGWAVLDDNGDLCRFKGKPTWGSRVFPTAETAAEARVHRGQRRRYDRRRQRIDLLQRFFADEVAKVDPEFFIRLNQARLHPENRDPAHADYRWPLFNGSNFTEKDYYRQFPTIYHLRAHLLKSDEPADIRLVYLALHNIVKHRGNFLHQDNPSLSARNANVGDAVEALCLALDEWCGAHDVECACDEAALAEALGDASLRPGEKRERAEAALGVEKAHKKLAKAVSSAVVGYAAEFGHVFFAESEGSKFALSNDEKVEAYVCPDEGRDLFDAMRAVHSSYVLMGILSEAQGELLSVCKVGEYERYKRDLETLKSLVRAYGPERYDEFFCGPFYEGTRDYDPGKAQGYTKYNLGASKLSHEDFLKEVQKLLKDIGAQADERYADIERAIEAGAFLRRLKTSDNGTIPYQLHLEEMDAIIERQAAFYPFLAQEKDKLKSLVSFRIPYYVGPLTQKNAARDGKGEARFAWSSRKPGMEDARVYPWNWEDVIDKDQSAEDFIRRMTGTCTYLKGEPVLARCSLDYELFCVLNELAGARWTQDGDKSYRFDAADRLGIVEDLFKKRKRVTYEAAEKWLARTHGPESGKSAGGAYHVSGGQGEDAFESQLSSHYDFCKILGVDELSDADEAMAEDIILWNTVFEDRSILKRKIKLAYGDRLGDAQVRKLCQKRYTGWGRLSGELLRGLRSATDNGPKTIMDILLEGDPNHARRMGAAMNLMEILHDDLLEFQAKIDEHNRERALAVGGMSVDEVTGSPALRRGINQALRVVDEIAGIAGKPPAHIYVEVTRDEGARNKGRRTTSRYRALEAALSSIKAQCADVYAELKERDPRALDDERLTLYFMQCGKCMYSGDALDINKLQTYQVDHILPQSYVKDDSFENKVLVRPDTNQRKGDTLLLDERLIARMRGFWRTLRDAELIGEKKFNNLTRTSVSDEQMKKFVSRQLVETGQMVKQVQQLLQARYPESEVQPVKAGVSHQLRVGCALAKSREINDFHHAHDAYLACQVGRFVQYRHSAVYSEPVKMAAVVKQFIKKQAEDYRRTRELPGSDGFIVSSFMTPGFDVKTGEVFRDAWDAGAEIDRIRRCFDYKDCFISRMPEETHGAFWDATIYSPRAAGKTLSLPLKRGLDPRKYGSYSREQFAYFFVYEAVKPKKKQRVLEFAPVPVRVASALANDPDALEDYARELAEAEGLVFERIRRRKVYKYQQIIVGDSRLYVTGREEVRNARQLAFSQDETKLICRIEQGEECEEGELLDLFRSMQRKYLACAPRLARLMKVAEMEEGFIAATASGKREVLLSLTSIAAAHRNSIDLKPIGRKGSSGQMKITFSKELSTNGILFVDSSVTGMFERRCRLGL

SEQ ID NO: 152 - protein, 1388 aa, Zunongwangia profunda
MKRILGLDLGTNSIGWALVNEAENEKEISKIIKLGVRVNPLTIDEKTNFEKGRPLSTNADRTLKRGARRNLQRYKLRRENLIEILIDNHIITKETPLTEIGKGTTYQTLSLRAKAVRERIDLEDFAKVLLAINKKRGYKSSRKASNDEEGQAIDGMAIAKELYERGITPGQYVLELLENDRKYIPDFYRSDLKQEFNKIWNNQKTFYPEILTDELFKELDGKNKSQTWAICQKPFNIKGIKRITKGREKTIENYHWRVKGLSGKLNLEKLAIILQEINNDINQSSGYLGGISDKSKKLYLNKETVGEFLYKQIAKNPHTSLKNQVFYRHDYLDEFEQIWKTQSNFNANLTDELKQEIRDVIIFYQRKIKSQKSLISFCQFESWEQEYFDKETGKTKTRTVGRRVIPKSSPLFQEFKIWQNLNHLVFTNSETDEKIEIKEVEQEIRKELFEELNLRGDLNPNDLLKILRSQFKIGKLSNWKCNFEKIEGNRTNAALFNIYQKISDFEGYGIDWNKSNAKKIRKELKATFPEIGIDASILEFDAYKKQLTNQSSYELWHLLYSAEEDFKISEQDKLIYGNSSVSLKKKLHLKFGFNPEYAKMLANLSLMSDYGNLSAKAIKKILPYLEDGHLYSEACRLAGYNHSKSLTAEELEKFEPKAKLDLLKKNSLRNPVVEKILNQMVNVVNQVIDTYGKPDGVRIELARELKKSAKERAEMTKGIADGTRRNEEIKKIITQKFGIPNPTKSDLVRYRLWQELESRGYKDIFTDKYISPDKIFSSEIDIEHIIPKALLFDDSFSNKTLSFRNVNLKKANRTALDFITQDYQSNVEAYKERVETWNKDNHISKGKRNKLLMSLKDIPDGFIERDLRNSQYIARKAKRMLYEVFPNEVLATSGSITDKLRSDWDLINVMKELNLPKYKALGLTEYEERLDKGTEELFKHEVIKDWTKRNDHRHHAMDALAVAFTTHNHIQYINNLNARKDITQDNHPIIKNIENLITEVNSKGKRVFKAPMSSFRESAKEQIEAILVSFKNKNKVVTKNINQTKKEGGFNYQNAKTPRGQLHKETIYGKSKQPLEKPVKINNRFCKKQVGLIINFKEQEAVLHHLKKYDNNEKIAFSNKTLKSDPIQVNGSPLREVKIFEEIFTIRKDINPDNFKTQKHLDKIIDKGIKEVMKKRLEEYNGDFKTAFSDLDKNPIWLNQSKGITIKRATISGVTNAEPLHQAKDHLGNIILDDNGKEIPIDYVSTGNNHHVAIYQDESGNLQEEVVSFYEAVIRKNQDQPIIKKRHPKGWKFLFTMKQNEMFVFSSENFNPSEIDLLDEKNAAIISPNLFRVQKIATKNYMFRHHLETEVTNNLDFTYRHFQATEWLRNLCKVRIDHIGRIVQIGEY

SEQ ID NO: 153 - protein, 1082 aa, Methylosinus trichosporium
MRVLGLDAGIASLGWALIEIEESNRGELSQGTIIGAGTWMFDAPEEKTQAGAKLKSEQRRTFRGQRRVVRRRRQRMNEVRRILHSHGLLPSSDRDALKQPGLDPWRIRAEALDRLLGPVELAVALGHIARHRGFKSNSKGAKTNDPADDTSKMKRAVNETREKLARFGSAAKMLVEDESFVLRQTPTKNGASEIVRRFRNREGDYSRSLLRDDLAAEMRALFTAQARFQSAIATADLQTAFTKAAFFQRPLQDSEKLVGPCPFEVDEKRAPKRGYSFELFRFLSRLNHVTLRDGKQERTLTRDELALAAADFGAAAKVSFTALRKKLKLPETTVFVGVKADEESKLDVVARSGKAAEGTARLRSVIVDALGELAWGALLCSPEKLDKIAEVISFRSDIGRISEGLAQAGCNAPLVDALTAAASDGRFDPFTGAGHISSKAARNILSGLRQGMTYDKACCAADYDHTASRERGAFDVGGHGREALKRILQEERISRELVGSPTARKALIESIKQVKAIVERYGVPDRIHVELARDVGKSIEEREEITRGIEKRNRQKDKLRGLFEKEVGRPPQDGARGKEELLRFELWSEQMGRCLYTDDYISPSQLVATDDAVQVDHILPWSRFADDSYANKTLCMAKANQDKKGRTPYEWFKAEKTDTEWDAFIVRVEALADMKGFKKRNYKLRNAEEAAAKFRNRNLNDTRWACRLLAEALKQLYPKGEKDKDGKERRRVFSRPGALTDRLRRAWGLQWMKKSTKGDRIPDDRHHALDAIVIAATTESLLQRATREVQEIEDKGLHYDLVKNVTPPWPGFREQAVEAVEKVFVARAERRRARGKAHDATIRHIAVREGEQRVYERRKVAELKLADLDRVKDAERNARLIEKLRNWIEAGSPKDDPPLSPKGDPIFKVRLVTKSKVNIALDTGNPKRPGTVDRGEMARVDVFRKASKKGKYEYYLVPIYPHDIATMKTPPIRAVQAYKPEDEWPEMDSSYEFCWSLVPMTYLQVISSKGEIFEGYYRGMNRSVGAIQLSAHSNSSDVVQGIGARTLTEFKKFNVDRFGRKHEVERELRTWRGETWRGKAYI

SEQ ID NO: 154 - protein, 1186 aa, Gardnerella vaginalis
MEGNISYAIGIDVGLNSVGLAAIRLDNNGEPIRILKAMSVIHDAGIDPNGAKESDTRKAISGVARRVRRLYRQRRRRLQKLDFLLHSLGFPVVENKDLDFSDSFTPWIFRAKLADEYIADEKQRKQMLSVAIRHIARHRGWRNPYQSIKSMTQETEYSEFYNELLKNIEKFAPGVSCEGSTPAQLVRDYLLSQQGKASRRLRITTDDRRKNHPNSLDPVLPRKLMQSDNMLEILNIFNVQHIDNKYVREQIINAVFYAKSPRGSAENRVGKDAITGKGKRALKASLAFQKYRIISTISNLRIRENSKERCLTIEEKQSVYKLLTTSTDEYSKEKSAEAPLYTWIDVADCLGIERYKLRGVGSQIEDGESVGNRPPMLNSELAILYANAKSLKQSLITWWLAANRTQEDKEAFIEILSNTVDIEAIHDNPEYQDKYGSVIAFIDSMDETEIAALENISLPNGRAAYSLETLDKLNKQMLETDDDLFEARKKLFNLPNNWRPSEAPIAEPTGNPSVDRVLKIVHRFLISAKNRWGNPERINIEHVRSGFQSKKMANSYKKLLDKRTEGKENLKAMMRNSLHLGTSDSISDADIRRYEAVQRQNGQCLYCGSEITYHTCELDHIVPRKGPGSTNTRENLVATCSSCNAQKCNTPFATWCEESTYCKNHDISVDSAINRVRAFIFPPNSYDKRGASQFKKEVIARLKQKVGDEAFDNRSIESVAWMANELHRRIDWYYNSQNYQTNNGISDITNKAQTNVGVYAGSLTAIARRMSGIDGKLEFFDGRRKTRFDRRHHAVDASVIAMMTPGIAQILAIKCNLRETQLLQGNKVVPGGIDWKEYPTANDQGYQQYANWSVRMNALLELLNEEMRADRIAVVNSIRLRYSNSSVHKDDVHALLKLHVGDEIDSETIRRASTPALYCALTRNPDYDVNNGLPENTDRTILLHDKKLNADDSITFFKSKAAQLFVREGSVEIGNSIHHLRIYEYFEKLKSGKVKKSYGMIRVFQDDLHRYIHEDLFSCDLPEQSISMRYADTKVAHAVQTGNANYLGYLVPGDEIIVDFSHVKLSGYIGEFVEFLNKIGANCAAYKHWVVAGTDDKTTLILKPSMISSEGIDKLYSNCERNNFDYASYEKSIDKILVDKGWRVSVNVLDQYKAATIRRNALGEPRWASRSHLPISWSWDTGENRE

SEQ ID NO: 155 - protein, 1434 aa, Bacteroidetes oral
MKNILGLDLGTNSIGWAYVKQAQNDSEKSEIAELGVRVNPLTVDEKTNFEKGKPISTNADRTLKRGARRNLQRYKLRRQELIELLKDYQVISDKTILAEDGKETTFETLRLRVKSAKEQVSLEELARILLMINKKRGYKSSRKAKNEDEGQLIDGMEIARRLYDENLTTGQLSLQLLKEGKKSLPDYYRSDLQHELDKVWNFQKQFHPDILTDEFYTSIQGKGQKATRESFSSKYGIDTAENKGSREEKKLQAYQWRADATHKELTKEELAFVITEINNNINNSSGYLGAISDRSKELIFANETVGEYLWKQIQNDPHTSLKNQVFYRQDYFDEFERIWETQSGFYPQILTESLKNELRDILIFYQRKLKSQKALVSICEFESKEIPLKDKQGNPISKNGIPVTKLVGPKVAPKSSPLFQEFKIWQNLNNVLVRPKGSRKRKVTTNQQSTLLEGQEPVFELNLEQKELLFEELNLKGNLKTDYCLELIGYSAKEWEMNYPTLEGNKTNKALYEAYLKIIDSEGYDAKKLLKVKTDKDDINLDDIKVSASEIKTMISDIFNELGINTKILDFDAELERKQFEAQASYRLWHLLYSYEGDDSKSGNELLYRLLEDKFGFKREHSKTLANVSLLSDYGNLSTKAIRTIYPYIKENKFSTACELAGYRHSKLSISKEENENRTLKDTLDVLKKNSLRQPVVEKILNQMINLINELIEKHSEKDEKGNIVKYFKFDEIHIELARELKKNAEERRELDSKVREGKDRNEKIITILKSEFGLPYPTKNDITRYRLYEELKDNGYKDLYTNTYIPREKLFSKEIDIEHIIPKSRLFNDSFSNKTICYRQDNLNKGERTAYDYIEGLGKTQLDEYLNRVENLYTNKFITKAKYRNLLKKESEIGDGFIERDLRETQYIAKKAKEMLLQITRHVVSTTGSITDRLRDDWELVNVMRELNLPKYKVLGLTEIQERKNGQTVEVITDWTKRNDHRHHAMDALTVAFTKHSHIQYLNFLNARKDEKHKEYSNIMGIQQLETEKTTDKDGKDRRVFKTPIPNFRQVAKEHLESILISHKTKNKVVTRATNKIAGSKKQQETLSPRGQLHKETVYGKYRRYVQKEEKIGSKFDLQTIERVANPLYKRLLTKRLEENGGDPKKAFTGKNALAKSPIYLDETQTQQLPEKVKLVWLETDFSIRKDITPDNFKDEKSIDKVLDEGIKRILKDRLKSFDGDAKRAFTDLEQNPIWLNKEKGIAIKRVTISGVSNAEPLHTKKDHLGNEIFDDTGKPIPVDYVSTGNNHHIAIYRDENGNLQEKAVSFFEAVTRANQGLPTVDKTYNQHLGWQFLFTMKQNEMFVFPNKETGFDPQEIDLLDPKNKKLISPNLFRVQKISTKNYFFRHHLETSVETHNALNGVTYKSQLGLNGITDIIKVRINHLGDIVHIGEY

SEQ ID NO: 156 - protein, 1341 aa, Peptoniphilus sp.
MWGSRLFEEASTAQDRREHRSNRRRLERRKYRLDLLEELFVEEINKIDPEFFIRLRESKFHFEDRSLKNTFILFNDKMEGGYNDKVFFSKYPTIYHLRSALINGNKEDVRAVFLAIHNILKNRGHFLLAGNDINISLSLNDTLTDLFEYLKIHLGIEVEFENKLKDIEKIALDKNLSKSDKQKKIVQLLETDYKKQLADVFKLSLGLTANMENIFGKENEQGLEFINAENKIKKIQFDSSYEENIAEFDQFYGEYFEIIDICKKIYDAISLSQILVDGKGLSESKVLSYEKHKEDLKLLKKVLKNIDKAYDNKGEDRLVYKVLKEDKDKGTNYVNYSKLSNNGTATTKEEFYKFLSKNLDLKKFGKLNKEDIETLDYINSEILLGRFLPLQKEKINGVIPYQLQMKELTQILNNASKYLPFLNKIEDGMTVKDKIISLIKFRIPYYVGPLNEYNRIENGNGFAWIEKKKNEKIFPWNFNDVVDIEKSAEKFINNLTNKCTYIKEETVLPKNSIIYSKFMVLNELNNLQYGNKKLDIELKMKMYTDLFLEKKDNRKVTEKRILEYFRINGINDGKEKLTGLNNEIHADMKSYRDMCEIMGENFNINVAENIINWITVFHGEKKILINKIKNVYGKMFNDEQISKLSKLNYSDWGRLSKKLLTDIKCYIDADGINFPVSILEAMEVSNKNLMELLSNKYEFISCIDDINNKYFGDRDISASELIDELYVSPAVKRGIWQSVRILEEIVSIIGHNPKKIFIEMTRHNEEKVQKSSRRHNLEELYKAIRKDPEYVELIKEFDSTTDTDSFKIKKLYLYFMQLGKCAYSKEKIDFDKLFTDSYDIDHIYPRSKTKDDSIHNNLVLVKAKYNREKTDVYPIDINIQKNMNSFWNFLYTKKFITEEKYKRLIRTSDLTDEELAKFISRQLVETSQSTKATAEVLKQIYGDSDICYVKAENVSDFRYGSSRQKDKNDIQKLFVKCREVNHFHHAKDAYLNIVVGNVYDVKFTKNPVNFIKKNKMGNKSNYSLNHMFCFDVERNGYKAWDSSETIKTVGRMMKSNDVRITKHVHPTRGELYDATIYKAKIAKTGSYMPLKSSKNTPLSDVTKYGGYTKIKIAYYSVYKYKFSDKNLIKTEIRLIPIPIYLSKNDDDIKEYVKNYLNDRVNSKLIDFTKIYDKLYVNSLIKINGYLYYLGGKTNDRVWIDNAVSIVLDDKIEYLIKRISNDIKYGYEINVSDDELMDIYESLAEKANKKIFYNRLSDFEKIFSNMDVKKKFVKLEKNDKCRVLLQLLNVLTDSQTTYKLEMVGLKHSRSNIGMKISNLEEFKVINSSITGLYSNEIDILNI

SEQ ID NO: 157 - protein, 1391 aa, Lactobacillus gasseri
MTKIKNEYIVGLDVGTNSCGWVAMDFQNTILRMHGKTAIGSHLFDAGNSAADRRAFRTTRRRIKRRKWRLKLLEEIFDPYMTEVDPYFFARLKESGLSPLDKRKNVSSIVFPTALEDKKFYCNYPTIYHLRYDLMSEDKKFDLREIYLAIHHIVKYRGNFLYNTPVKDFEASKIDVKDSLEKLNELYERLDSEFTVELDSSNALEIEKIIRDKKVFKINKVKSIHQLLSLKTENKERTKLIKDVSKQIINAILGYKTKFETILLKNISKDEADDWEFKLTDVDADNKFENLIGDLNENEQEILLEIRNLANAITLSNIVEEGKTLSESMIDKYNKHSDDLELLKQVISDHPDRDKAKKLALAYDLYVNNRHGKLLQAKDVLGSKKTLSKEDFYKEVKKNLDDSKASQEILDTIALDSFMPKQRTNENGVIPYQLHQLELDRIIKNQGKYYPFLKEVNPVSSHLKEAPYKLDELIRFRVPYYVGPLISPNESTKNKQTKKNQNFAWMIRKEQGQITPWNFDQKVDRMASANKFIKRMTTKDTYLLGEDVLPANSLLYQKFTVLNELNNIKINGKRISVPLKEELYNNLFKKNSTVTTNKLKSYLKENYNLINVEIKGLADEKKFNSGLTTYNKLRNLKIFDQQLDDLNYDKDFERIIEWSTIFEDKAIYKDKLKTIKWLSDRQIDKLSKIRMQGWGQLSKKLLSQLTDNNGQTIIEQLWDSQNNFMQIVNQSDFKDAIAVANQNLLVNTSVEDILNEAYTSPANKKAIRQVVKVVDDIVKAASGKVPKQIAIEFTRDADDKAKISQTRANKLRKVYKELSNELASETIRNELERVAKDQKLLKDKYYLYFMQLGRDAYTGEPINIDDLGQYDIDHILPQSFIKDDSLENRVLVKKAVNNGKSDNVPVKLYGNRMAADLGMTIRHMWEKWKDQGLITKTKYNNLIIDPDKINKYESSGFIHRQLVETSQIIKLVSTILQSKYPDTEIIVVKARYNHYLRKHLNLYKSREVNDYHHAIDAYLSAICGNLLYQVYPYLRPFFVYGQYKKFSSDPKKEKIIYDKTRKYNFISQIFENKSNDIISLETKKKVFDKKDIIEKLKHAYNYKYMLVSRETETHDQEMFKMTVYPRLSRDTKKSRNLISKKKDMPTEIYGGYTNNSDAYMVIARINKKKGTEYRVFGVPMRELVNLRKAEKNGRYNAYLKQVLEPEIMYSKNGKKNKTISSFEIVKAKVPYKQVILDGDKKFMLASSTYVQNAKQLTLSQNSMQAITDNCENDTEEEKALEEKALIEAYDEILTNIDKYLPLFDINKFREKLHAGREKFINLSLDVKKDTILQVLNGLHDNAVMPKIKSLGLSTPLGFMQFSSGVPLSENAKLIYQSPTGLFEKRVKISDL

SEQ ID NO: 158 - protein, 1426 aa, Sphingobacterium spiritivorum
MKHILGLDLGTNSIGWALIKQDFENKQGEILGMGSRIIPMSQDILGDFGKGNSVSQTAERTKYRSVRRLRERFLLRRERLHRILNVLGFLPEHYASQIDFTKRFGKFKEETEPKLVYSNEGFIFKKSFEEMLSDFKTHQPQLLEDNKKIPYDWTIYYLRKKALSRKIEKEELAWILLNFNQKRGYYQLRGEEEEENPNKLIEFYSLKIVDVLADEPQKGKSDIWYSLILENGWIYRRSSKTPLFDWKEKTRDFIVTIDLNDDGSVKTDKEGNEKRSFRAPGENDWTLVKKKTEQEIDSSRKTVGTYIYETLLKNPKQKIKGKLVRTIERKFYKTELKQILEKQKEFHPELRQDDLYSDCVRELYKNNEAHQLTLSKKDFVHLFMEDIIFYQRPLGSQKSSISNCTLEFRKYKDENGTEHTQYLKAIPKSNPYYQEFRIWQWMYNLNIYKKEDDTNVTKDFLNTKADFESLFEFLNNRKEVDQKALLKHFKLNDKTHRWNYVEDKKYPCNETKTMILSRLDKVENISDDFLTREMEQKIWHIIYSVNDKVEYEKALKSFAGKNNLEDNSFFEAFKKFPPFKSEYGAFSEKAIKKLLPLMRMGKFWNYNNISEQSKSRIQKIITGEYDENIKDKVREKAIHLTTETDFQGLQLWLVQYIVYGRHSEAAMLGKWNSADDLEEFLKEFKQHSLRNPIVEQVITETLRVVKDIWQKYGNGAKDFFREIHIELGREMKLPAEERERLTRQISENENTNFRIKALLAEMMDDNSVENVRPFSPMQQEILKIYEEGVLNSDIEIEDDILKISKTAQPSSSDLKRYKLWLEQKYKSPYTGQIIPLNKLFTPEYEIEHIIPQSRYFDDSFTNKIICESAVNKLKDNYIGLEFIKKLGGSIVECGNGKSVAILKHDAYEDFIKKHYANNRSKRNKLLLEDIPEKMIERQMNDTRYISKYISGVLSNIVRVEDGTDEGVNSKNIVPGNGKITTQLKQDWGLNDVWNDLILPRFERMNHLTNSTDFTAWNENHQKFLPTVPVEFSKGFSKKRIDHRHHALDALVIACATKDHVNLLNNQSAKSDTKRYDLKKKLMKFEKVAYNHPQTGERIEREAPKQFLKPWETFTIDAKNHLETIIVSFKQNLRVINKATNYYEKYVEKEGTKVKERVEQKGTNWAIRKPMHKETVSGKIDLPRIKVPKGKILTATRKSLDTSFNLKTIGSITDTGIQKILKNYLQYKDNNPELAFSPEGIEDMNKNIEKFNNGKAHQSISKVRVFELGSKFPLGQSGNKKEKYVEAAKGTNLFFAIYQDKNGKRSYETIPLNEVIERQKQGLSVVDLKGVDDFYLSPNDLVYVPSEDELENISMIDFNKMSSERIYKVVSFTGNQIFFVRQDIATSVVNKAEFSTLNKMERAIDGTMIKETCVKLQIDRLGNISKI

SEQ ID NO: 159 - protein, 1361 aa, Lactobacillus casei; identical to SEQ ID NO: 75

SEQ ID NO: 160 - protein, 1436 aa, Bacteroides fragilis
MKRILGLDLGTNSIGWALVNEAENKDERSSIVKLGVRVNPLTVDELTNFEKGKSITTNADRTLKRGMRRNLQRYKLRRETLTEVLKEHKLITEDTILSENGNRTTFETYRLRAKAVTEEISLEEFARVLLMINKKRGYKSSRKAKGVEEGTLIDGMDIARELYNNNLTPGELCLQLLDAGKKFLPDFYRSDLQNELDRIWEKQKEYYPEILTDVLKEELRGKKRDAVWAICAKYFVWKENYTEWNKEKGKTEQQEREHKLEGIYSKRKRDEAKRENLQWRVNGLKEKLSLEQLVIVFQEMNTQINNSSGYLGAISDRSKELYFNKQTVGQYQMEMLDKNPNASLRNMVFYRQDYLDEFNMLWEKQAVYHKELTEELKKEIRDIIIFYQRRLKSQKGLIGFCEFESRQIEVDIDGKKKIKTVGNRVISRSSPLFQEFKIWQILNNIEVTVVGKKRKRRKLKENYSALFEELNDAEQLELNGSRRLCQEEKELLAQELFIRDKMTKSEVLKLLFDNPQELDLNFKTIDGNKTGYALFQAYSKMIEMSGHEPVDFKKPVEKVVEYIKAVFDLLNWNTDILGFNSNEELDNQSYYKLWHLLYSFEGDNTPTGNGRLIQKMTELYGFEKEYATILANVSFQDDYGSLSAKAIHKILPHLKEGNRYDVACVYAGYRHSESSLTREEIANKVLKDRLMLLPKNSLHNPVVEKILNQMVNVINVIIDIYGKPDEIRVELARELKKNAKEREELTKSIAQTTKAHEEYKTLLQTEFGLTNVSRTDILRYKLYKELESCGYKTLYSNTYISREKLFSKEFDIEHIIPQARLFDDSFSNKTLEARSVNIEKGNKTAYDFVKEKFGESGADNSLEHYLNNIEDLFKSGKISKTKYNKLKMAEQDIPDGFIERDLRNTQYIAKKALSMLNEISHRVVATSGSVTDKLREDWQLIDVMKELNWEKYKALGLVEYFEDRDGRQIGRIKDWTKRNDHRHHAMDALTVAFTKDVFIQYFNNKNASLDPNANEHAIKNKYFQNGRAIAPMPLREFRAEAKKHLENTLISIKAKNKVITGNINKTRKKGGVNKNMQQTPRGQLHLETIYGSGKQYLTKEEKVNASFDMRKIGTVSKLAYRDALLKRLYENDNDPKKAFAGKNSLDKQPIWLDKEQMRKVPEKVKIVTLEAIYTIRKEISPDLKVDKVIDVGVRKILIDRLNEYGNDAKKAFSNLDENPIWLNKEKGISIKRVTISGISNAQSLHVKKDKDGKPILDENGRNIPVDFVNTGNNHHVAVYYRPVIDKRGQLVVDEAGNPKYELEEVVVSFFEAVTRANLGQPIIDKDYKTTEGWQFLFSMKQNEYFVFPNEKTGFNPKEIDLLDVENYGLISPNLFRVQKFSLKNYVFRHHLETTIKDTSSILRGITWIDFRSSKGLDTIVKVRVNHIGQIVSVGEY

SEQ ID NO: 161 - protein, 1517 aa, Bacteroides sp.
MKKIVGLDLGTNSIGWALINAYINKEHLYGIEACGSRIIPMDAAILGNFDKGNSISQTADRTSYRGIRRLRERHLLRRERLHRILDLLGFLPKHYSDSLNRYGKFLNDIECKLPWVKDETGSYKFIFQESFKEMLANFTEHHPILIANNKKVPYDWTIYYLRKKALTQKISKEELAWILLNFNQKRGYYQLRGEEEETPNKLVEYYSLKVEKVEDSGERKGKDTWYNVHLENGMIYRRTSNIPLDWEGKTKEFIVTTDLEADGSPKKDKEGNIKRSFRAPKDDDWTLIKKKTEADIDKIKMTVGAYIYDTLLQKPDQKIRGKLVRTIERKYYKNELYQILKTQSEFHEELRDKQLYIACLNELYPNNEPRRNSISTRDFCHLFIEDIIFYQRPLKSKKSLIDNCPYEENRYIDKESGEIKHASIKCIAKSHPLYQEFRLWQFIVNLRIYRKETDVDVTQELLPTEADYVTLFEWLNEKKEIDQKAFFKYPPFGFKKTTSNYRWNYVEDKPYPCNETHAQIIARLGKAHIPKAFLSKEKEETLWHILYSIEDKQEIEKALHSFANKNNLSEEFIEQFKNFPPFKKEYGSYSAKAIKKLLPLMRMGKYWSIENIDNGTRIRINKIIDGEYDENIRERVRQKAINLTDITHFRALPLWLACYLVYDRHSEVKDIVKWKTPKDIDLYLKSFKQHSLRNPIVEQVITETLRTVRDIWQQVGHIDEIHIELGREMKNPADKRARMSQQMIKNENTNLRIKALLTEFLNPEFGIENVRPYSPSQQDLLRIYEEGVLNSILELPEDIGIILGKFNQTDTLKRPTRSEILRYKLWLEQKYRSPYTGEMIPLSKLFTPAYEIEHIIPQSRYFDDSLSNKVICESEINKLKDRSLGYEFIKNHHGEKVELAFDKPVEVLSVEAYEKLVHESYSHNRSKMKKLLMEDIPDQFIERQLNDSRYISKVVKSLLSNIVREENEQEAISKNVIPCTGGITDRLKKDWGINDVWNKIVLPRFIRLNELTESTRFTSINTNNTMIPSMPLELQKGFNKKRIDHRHHAMDAIIIACANRNIVNYLNNVSASKNTKITRRDLQTLLCHKDKTDNNGNYKWVIDKPWETFTQDTLTALQKITVSFKQNLRVINKTTNHYQHYENGKKIVSNQSKGDSWAIRKSMHKETVHGEVNLRMIKTVSFNEALKKPQAIVEMDLKKKILAMLELGYDTKRIKNYFEENKDTWQDINPSKIKVYYFTKETKDRYFAVRKPIDTSFDKKKIKESITDTGIQQIMLRHLETKDNDPTLAFSPDGIDEMNRNILILNKGKKHQPIYKVRVYEKAEKFTVGQKGNKRTKFVEAAKGTNLFFAIYETEEIDKDTKKVIRKRSYSTIPLNVVIERQKQGLSSAPEDENGNLPKYILSPNDLVYVPTQEEINKGEVVMPIDRDRIYKMVDSSGITANFIPASTANLIFALPKATAEIYCNGENCIQNEYGIGSPQSKNQKAITGEMVKEICFPIKVDRLGNIIQVGSCILTN

SEQ ID NO: 162 - protein, 1399 aa, Olsenella uli
MNLRNTTDEYNIGLDMGTNSVGWAVTDKAGAIAHFKGKPTLGSRLFDAAQTAAGARIHRSQRRRYVRRRWRLDLLQSLFQDEVSKVDSEFFCRLRQSRLYVGDREKGHADYTWPIFNDSDFNEVDYYKRFPTIYHLRKWLMETDEKADIRLIYLATHNIVKHRGNFLRENNKSLSSRDANPAQAVKSLRLALNDWCSERDYECAWKGEEDDGAIDEAILNVLADGEKGRSDQAKEIAKLTGVDCGDAKQSKQCNEAIAKAIVGLKVEMKNIFGEFPAEKTSYIYLSSDEDVEAVRESCPDDSGELFQALCKLYSAYILQELLSYADPSGQTISANMVAKYKQYGRDLRLLKELTRTYAPQKYDLFFRGETYAGSSDYVVDEARGYTRYNLGTTKANYDDFQKSVKELFKGTDALQDERYQEMMVAFGEQKFLRRLKTSDNGSIYYQLHLEELHTILENQGKHYPFLLSEEDKIESLVSFRIPYYVGPLTRKNAAIGHDGKERFAWSSRKDGMEHAVITPWNWEEIIDRDKSAEDFIMRMTGDCTYLQGEPVLPKCSLLYEEFCALNEFNGAHWTVDGDDERRFDAAQRERIMCDLFRRTRSVTYNKVSDWLERKYNFTGARVRGGQGEHGFESKLGSYIFFCKDVFKTDGLDEADYTMIEQIILWSTLFEDRDILKRKIEEAYGGDRLTSEQIKVICKKRFTGWGRLSKRLLTDIKVNTDTGRKSIMDVLREGNPNNGQRSRTMVFMEVLRDEDLGFQKAIDGLNRDYFREHNNGLMDVNDLPGSPAIRRSINQAVRIVDEIASIARKEPTNIFIEVTREEDDPRKKGKRTKRRYDAIKSALEKFKKDDPSLWKELCEKAPGDMDERLSLYFMQRGKCMYSGRPIKIEELHTGKYEVDHIIPRSYIKDDSFENKVLVYREENQHKTDALLIDSSIRQKMGGYWRMLHDAKLVGDKKFRNLFRNHIDDKAMKGFVARQIVETSQMVKLVQTLFEARYPNTRIVPVKAGISHDLREAAGLVKCREANDFHHAHDAFLACRIGLFIQKRHPSVYDNPIGLARIMRDYARMQAREYKKSHCLAHTQGFIVNSFLSSGFDEETGEIFKDDWDAKAEVEGIRRVLNCRQCFISRMPVEGDTRYGGRYWGETIYSPKGKHKHEIPLKQGLDPNLYGGYSDLLYSYFLIYEASDVSSGERVLRFIGIPTSIAARMANQKRLEEYVSRLALQENLEHVRMVRKIMKKQLIEVDNCRLLVTAADAVTNATELAFSLDEMKIISTCAKCINGADPSAIDKIGNAQDSFFDNLKRRGSDRCALLFSQLKLDKLSQNFYMISSDDKSKILISILDRIRAKSNSVDLSLVGGAKHAAQMKFDFNAKLNNPASSFVLIDQSVTGMFERRTRIGL

SEQ ID NO: 163 - protein, 1398 aa, Veillonella atypica
METQTSNQLITSHLKDYPKQDYFVGLDIGTNSVGWAVTNTSYELLKFHSHKMWGSRLFEEGESAVTRRGFRSMRRRLERRKLRLKLLEELFADAMAQVDSTFFIRLHESKYHYEDKTTGHSSKHILFIDEDYTDQDYFTEYPTIYHLRKDLMENGTDDIRKLFLAVHHILKYRGNFLYEGATFNSNAFTFEDVLKQALVNITFNCFDTNSAISSISNILMESGKTKSDKAKAIERLVDTYTVFDEVNTPDKPQKEQVKEDKKTLKAFANLVLGLSANLIDLFGSVEDIDDDLKKLQIVGDTYDEKRDELAKVWGDEIHIIDDCKSVYDAIILMSIKEPGLTISQSKVKAFDKHKEDLVILKSLLKLDRNVYNEMFKSDKKGLHNYVHYIKQGRTEETSCSREDFYKYTKKIVEGLADSKDKEYILNEIELQTLLPLQRIKDNGVIPYQLHLEELKVILDKCGPKFPFLHTVSDGFSVTEKLIKMLEFRIPYYVGPLNTHHNIDNGGFSWAVRKQAGRVTPWNFEEKIDREKSAAAFIKNLTNKCTYLFGEDVLPKSSLLYSEFMLLNELNNVRIDGKALAQGVKQHLIDSIFKQDHKKMTKNRIELFLKDNNYITKKHKPEITGLDGEIKNDLTSYRDMVRILGNNFDVSMAEDIITDITIFGESKKMLRQTLRNKFGSQLNDETIKKLSKLRYRDWGRLSKKLLKGIDGCDKAGNGAPKTIIELMRNDSYNLMEILGDKFSFMECIEEENAKLAQGQVVNPHDIIDELALSPAVKRAVWQALRIVDEVAHIKKALPSRIFVEVARTNKSEKKKKDSRQKRLSDLYSAIKKDDVLQSGLQDKEFGALKSGLANYDDAALRSKKLYLYYTQMGRCAYTGNIIDLNQLNTDNYDIDHIYPRSLTKDDSFDNLVLCERTANAKKSDIYPIDNRIQTKQKPFWAFLKHQGLISERKYERLTRIAPLTADDLSGFIARQLVETNQSVKATTTLLRRLYPDIDVVFVKAENVSDFRHNNNFIKVRSLNHHHHAKDAYLNIVVGNVYHEKFTRNFRLFFKKNGANRTYNLAKMFNYDVICTNAQDGKAWDVKTSMNTVKKMMASNDVRVTRRLLEQSGALADATIYKASVAAKAKDGAYIGMKTKYSVFADVTKYGGMTKIKNAYSIIVQYTGKKGEEIKEIVPLPIYLINRNATDIELIDYVKSVIPKAKDISIKYRKLCINQLVKVNGFYYYLGGKTNDKIYIDNAIELVVPHDIATYIKLLDKYDLLRKENKTLKASSITTSIYNINTSTVVSLSNKVGIDVFDYFMSKLRTPLYMKMKGNKVDELSSTGRSKFIKMTLEEQSIYLLEVLNLLTNSKTTFDVKPLGITGSRSTIGVKIHNLDEFKIINESITGLYSNEVTIV

SEQ ID NO: 164 - protein, 795 aa, Prevotella disiens
MEKQRILGLDPGTNSLGWAVLDFDNSKQEYNLVRKGEVIFEEGVGKSKRGEFSKAAYRTFYKSTRKHYFRRRLRKIEVLKVLVKYDFCPYLSDDLLKQWHEKKIYPAVKEFMDWQRTSDAEGKNPYYDRHCCLNEKLDLSLKSDRYVLGRALYHLTQRRGFKSNRLIQNNDENEEGKVKKGISELSTEMQEANCNYLGDYFYKLYTEKGNTVQIRKRYTDREKHYKNEFNAICEKQELNETIVKELDKAIFFQRKLKPQRHGVGKCTFEPNNRRCAISHPDFERFRMLCFINNIKIKTPFEENLRPLNNEEKALIEPLFYRKSIKNFDFEEIAKKLAGKNNYCYIKDDSSKQYKFNYRMSQGASTCQTIAKLKSIFGEEWKNGIAETYTNRRKKEGLKKQAEMVDDIWNVLYSVSECDVLKDFAINKLQLDEKTADNFSKTKLAQGFATLSLKAIRKILPFLEQGFGYTEAVFLANIPTVVGKEYWNNEDIRNDIMEEIKTIFYHNTLKTNDSHNTILFCIKDILSNNFDLAPGAIDKLYHPSMINVYKDVIPNEDGILQLGSPKIDAVKNPMAMRSLHIIRKVVNELLREGIINSDTEVRIEYARELNDANKRHAIADWQKKQYGKHQKYRKEIKELFKAETGFEIEPNETDILKFELWEEQNHICLYTGQEIGISEFVGENPKYDIEHTIPRSLGGDSTKMNMTLCENKFNRENKQKKLPSELANHSEILERIDDWKKKIYILQKKYDSIRTHNGMDKENKDKKIVSMQVRISGSSICVYSQNTLLWLQYGYN

SEQ ID NO: 165 - protein, 1428 aa, Burkholderiales bacterium
MGKTHIIGVGLDLGGTYTGTFITSHPSDEAEHRDHSSAFTVVNSEKLSFSSKSRTAVRHRVRSYKGFDLRRRLLLLVAEYQLLQKKQTLAPEERENLRIALSGYLKRKGYARTEAETDTSVLESLDPSVFSSAPSFTNFFNDSEPLNIQWEAIANSPETTKALNKELSGQKEADFKKYIKTSFPEYSAKEILANYVEGRRAILDASKYIANLQSLGHKHRSKYLSDILQDMKRDSRITRLSEAFGSTDNLWRIIGNISNLQERAVRWYFNDAKFEQGQEQLDAVKLKNVLVRALKYLRSDDKEWSASQKQIIQSLEQSGDVLDVLAGLDPDRTIPPYEDQNNRRPPEDQTLYLNPKALSSEYGEKWKSWANKFAGAYPLLTEDLTEILKNTDRKSRIKIRSDVLPDSDYRLAYILQRAFDRSIALDECSIRRTAEDFENGVVIKNEKLEDVLSGHQLEEFLEFANRYYQETAKAKNGLWFPENALLERADLHPPMKNKILNVIVGQALGVSPAEGTDFIEEIWNSKVKGRSTVHSICNAIENERKTYGPYFSEDYKFVKTALKEGKTEKELSKKFAAVIKVLKMVSEVVPFIGKELRLSDEAQSKFDNPYSLAQLYNLIETERNGFSKVSLAAHLENAWRMTMTDGSAQCCRLPADCVRPFDGFIRKAIDRNSWEVAKRIAEEVKKSVDFTNGTVKIPVAIEANSFNFTASLTDLKYIQLKEQKLKKKLEDIQRNEENQEKRWLSKEERIRADSHGICAYTGRPLDDVGEIDHIIPRSLTLKKSESIYNSEVNLIFVSAQGNQEKKNNIYLLSNLAKNYLAAVFGASDLSQITNEIESTVLQLKAAGRLGYFDLLSEKERACARHALFLNSDSEARRAVIDVLGSRRKASVNGTQAWFVRSIFSKVRQALAAWTQETGNELIFDAISVPAADSSEMRKRFAEYRPEFRKPKVQPVASHSIDAMCIYLAACSDPFKTKRMGSQLAIYEPINFDNLFTGSCQVIQNTPRNFSDKTNIANSPIFKETIYAERFLDIIVSRGEIFIGYPSNMPFEEKPNRISIGGKDPFSILSVLGAYLDKAPSSEKEKLTIYRVVKNKAFELFSKVAGSKFTAEEDKAAKILEALHFVTVKQDVAATVSDLIKSKKELSKDSIENLAKQKGCLKKVEYSSKEFKFKGSLIIPAAVEWGKVLWNVFKENTAEELKDENALRKALEAAWPSSFGTRNLHSKAKRVFSLPVVATQSGAVRIRRKTAFGDFVYQSQDTNNLYSSFPVKNGKLDWSSPIIHPALQNRNLTAYGYRFVDHDRSISMSEFREVYNKDDLMRIELAQGTSSRRYLRVEMPGEKFLAWFGENSISLGSSFKFSVSEVFDNKIYTENAEFTKFLPKPREDNKHNGTIFFELVGPRVIFNYIVGGAASSLKEIFSEAGKERS

SEQ ID NO: 166 - protein, 1025 aa, gamma proteobacterium
MGGYMPQLMRYRLALDIGSTSIGWAMIRLSMQNEPIAIIRMGVRIFSDGRNPKDGSSLAVTRRVARQMRRRRDRLLKRKTRLLNALVQKKFFPEDADARKALVVLNPYELRKEGLYRQLSGPEFGRALFHISQRRGFLSNRKTDKKDNDSSVLKKAIVDLRQQLEVENCQTIGEWLFKQQQSGKSVRARLRGKTQKDKAYDFYIDRAMIAHEFDTLWVSQAKYDPLLFNEDARAILRDILLYQRPLKPVKPGRCTLIPDESRAPLALPLTQQARIYQELNHLRITTPALGAQALTVAQRNTIAALLEKSDVTFVKIAKALGLTSTTEFNLQDIKRDRLKGNATAIILARNQYFGRRWHDFNADLQNLIVDKLVNEGSETALIEWLKANTDVDESAAERVSGVTLPEGYGSLSVAALRRLLPALKEDVVVYSEAVKRAGFDSHSALSLIEQTGELYQELPYYGEVLQRHVGFGSGDPNDSPERRFGKIANPTVHIGLNELRKIINALIKRYGNPAEVVVELARDLKLSREKRKEIQEEQKQRQDRNEKRIKDACEILGIDPLVIDRGKRREISQKMQLWDELNPKDAANRRCPYTGDQISIEKLLSAEVEIEHILPFSKTLDDSLNNKTVAMRRANRDKGNRTPYEAFGESLNPDYDYDAILQRASLMPREKRKRFASDGYQQWLRDDKDFLSRALNDTAYLSRIAKEYLTLICPPNSVRAIPGRMTAQLRAMFGLNRLLSEGGIKNREDHRHHAIDAAVIGVTDQGLLQKFSRASARTRELQLSRLVDDMPLPWDTYREHVTRALEHLVVSHKPDHGYQGKMHEDTAWGLRDNGQVTRRVRSEDGGPRQRLLENKNVVKINSTRDFSRHGIDEQGQVNAYKGYVGGSNYCIEIWIDEKGKWNSDVVSTFQAYQIVRELGEKAAWQKLRNPLLSLSAKPLVMRLIIDDVVKMQIAGQNKIMRVVKIAQNGQIFFAEHNEANVDARDKDKNNPFKYISKTAGSLQKAGGIHMAISPIGDARPVRYGR

SEQ ID NO: 167 - protein, 1364 aa, Pediococcus acidilactici
MGDRKYNLGLDIGTSSIGFAAVDENNQPIRVKGKTAIGVRLFEEGKTAADRRGFRTTRRRLSRRRWRINLLNEIFDAHLAEVDPTFLARLKESNRSNLDPKKSFQGSLLFPERKDYQFYEEYPTIYHLRKALMEKDRKFDFREIYLAVHHIIKYRGNFLNGTPMRSFKVENIELDTLFDQLNQLYAEIVPDNELAFDLAQVADVKDVLSSTTIYKMDKKKQLVKMMLLPASNKALQSENKKIVTQFVNAILNYKFKLDVLLQVETDADWSLKLNDEGADDKLEEFTGDLDENRLEIIDLLQRLHNWFSLNEITKDGNSLSAAMVEKYENHHHHLGLLKKVIENHPDAKKAKALKETYTAYVGKTDDKTQNQDDFYKAVEKNLDDSPDAKEIKRLIQLDQFMPKQRTGQNGAIPHQLHQQELDQIIEKQSKYYPFLAEPNPNVKRRKDAPYKLDELIAFKIPYYVGPLVTPEEQAQNGENVFAWMKRKAAGPITPWNFDEKVDRMESANRFIRRMTTKDTYLFGEDVLPAESMIYQKFVVLNELNNLKINGRHLSLKDKQDVYNDLFKQQKTVSIKALQNYYVTKKKAATAPTVGGLADPKKFLSSLSTYIDFKNMFGERVNDPQFQEDLEQIVEWSTIFEDRGIFKAKLQALGWLSEKQIQQLVAKRYKGWGRLSKKLLTGLKNAEGYSILDEMWRSTGNFMQIQSRPEFAALIQQANEKQFEGNDPDNVWENIENILGDAYTSPQNKKAIRQVVKVVQDIEKAVGNPPEKIAIEFTREAAANPQRTQSRLRTLEKLYESAEEVVDAGLTAELAEFKENKHVLSDKYYLYFTQLGRDVYTGDTISLDKLNDYDVDHILPQSFIKDDSLDNRVLTIRAVNNGKSDNVPAKMFGKKMGSFWRYLLDNGMISKRKYNNLITDPDNISKYAQKGFINRQLVETSQVIKLTANILNGIYDKDTEIIEVPAKMNSQMRKMFDLVKVREVNDYHHAFDAYLTIFIGNYLYKCYPKLQPYFVYDNFKKFGNKEDIGHKRFNFLGKIEREKKVVAPETGEILWSNVAPNETIKQIKKVYDYKFMIVSREITTRRAELFNQTVYPKNYHGKLIPIKEDRPTDLYGGYSGNTDAYLAIVALEDKKKGKYFKVVGIPTRVAAKLEKLKQQDSQQYLQALHKVIAPQFTKSTKKGIKKTEFEIVLDKVHYRQLVQDGPVKMMLGSSTYKYNAKQLVLSEKALQVIADDRKFDETQKDDNLIAVYDEILSIVNQSFDLYDINGFRKKLNDNRDQFIDLPAETKYEGRKVVAHGKREMILEILKGLHANAAFGNLKPIGFSTAFGQLQVPNGIILSKNAILIHQSPSGLFERKIKLSDL

SEQ ID NO: 168 - protein, 1364 aa, Peptoniphilus duerdenii
MKNLKEYYIGLDIGTASVGWAVTDESYNIPKFNGKKMWGVRLFDDAKTAEERRTQRGSRRRLNRRKERINLLQDLFATEISKVDPNFFLRLDNSDLYREDKDEKLKSKYTLFNDKDFKDRDYHKKYPTIHHLIMDLIEDEGKKDIRLLYLACHYLLKNRGHFIFEGQKFDTKNSFDKSINDLKIHLRDEYNIDLEFNNEDLIEIITDTTLNKTNKKKELKNIVGDTKFLKAISAIMIGSSQKLVDLFEDGEFEETTVKSVDFSTTAFDDKYSEYEEALGDTISLLNILKSIYDSSILENLLKDADKSKDGNKYISKAFVKKFNKHGKDLKTLKRIIKKYLPSEYANIFRNKSINDNYVAYTKSNITSNKRTKASKFTKQEDFYKFIKKHLDTIKETKLNSSENEDLKLIDEMLTDIEFKTFIPKLKSSDNGVIPYQLKLMELKKILDNQSKYYDFLNESDEYGTVKDKVESIMEFRIPYYVGPLNPDSKYAWIKRENTKITPWNFKDIVDLDSSREEFIDRLIGRCTYLKEEKVLPKASLIYNEFMVLNELNNLKLNEFLITEEMKKAIFEELFKTKKKVTLKAVSNLLKKEFNLTGDILLSGTDGDFKQGLNSYIDFKNIIGDKVDRDDYRIKIEEIIKLIVLYEDDKTYLKKKIKSAYKNDFTDDEIKKIAALNYKDWGRLSKRFLTGIEGVDKTTGEKGSIIYFMREYNLNLMELMSGHYTFTEEVEKLNPVENRELCYEMVDELYLSPSVKRMLWQSLRVVDEIKRIIGKDPKKIFIEMARAKEAKNSRKESRKNKLLEFYKFGKKAFINEIGEERYNYLLNEINSEEESKFRWDNLYLYYTQLGRCMYSLEPIDLADLKSNNIYDQDHIYPKSKIYDDSLENRVLVKKNLNHEKGNQYPIPEKVLNKNAYGFWKILFDKGLIGQKKYTRLTRRTPFEERELAEFIERQIVETRQATKETANLLKNICQDSEIVYSKAENASRFRQEFDIIKCRTVNDLHHMHDAYLNIVVGNVYNTKFTKNPLNFIKDKDNVRSYNLENMFKYDVVRGSYTAWIADDSEGNVKAATIKKVKRELEGKNYRFTRMSYIGTGGLYDQNLMRKGKGQIPQKENTNKSNIEKYGGYNKASSAYFALIESDGKAGRERTLETIPIMVYNQEKYGNTEAVDKYLKDNLELQDPKILKDKIKINSLIKLDGFLYNIKGKTGDSLSIAGSVQLIVNKEEQKLIKKMDKFLVKKKDNKDIKVTSFDNIKEEELIKLYKTLSDKLNNGIYSNKRNNQAKNISEALDKFKEISIEEKIDVLNQIILLFQSYNNGCNLKSIGLSAKTGVVFIPKKLNYKECKLINQSITGLFENEVDLLNL

SEQ ID NO: 169 - protein, 1089 aa, Corynebacterium matruchotii
MNSANVNYRVGIDVGSYSLGMAAIAIDDDGKPTEILSAISLIHDSGVDPDSAKSAATRLATSGIARRTRRLYRRKRKRLAKLDKFISSQGWPLKEFEKYEDPFYPWRVRAELATTAITDQQELGEKLSIALRHIARHRGWRNPYSKVTALYTVTEPSDAFLAMQEECAKQLGRTIPETITVGQLVTGMNLGKTRLRGENSLLAARPRQSDNANEIHTIAKVQGLSNELVRQIIDHVFAAESPKGSAAEQVGKDPLQPTKKRALKASDAFQQYRIAALIGNLRIRGGKGNRRLTTEETRLVFDYLRSLPAKQEPTWQLVAEQLKIDRGNLVGTAIMTDDGERAGAKPPVHDTNRIMENTKIKPLATWWKSADADARAAMVKALSNAEVDDFDSQAGAQVQEFFFGISDEDQEKLDGLHLPIGRAAYSEDTLDRLTKRMIGEGMDLYEARQAEFKISNDWAPPAPEIGERVGNPAVDRVLKATARWLNAAERQWGAPKSVNIEHVRAAFMSESSARELDRDNQQRAKRNVKVVAEMQEKLGIEGRPSRADVWRFQSIQRQNGKCAYCGAEISFKNSEMDHIIPQAGEGSTNTRDNLVAVCRECNSSKSNIAFAVWAENTSRPGVSVQKAIERTHHWVTDSGLRKPEFDKFRKQVCDRLRRKATDEPIDARSLESVAWMANELRSRIAQKFKDGDTKVRVYKGALTAEARRASGISGKLEFVDGKGKSRLDRRHHAVDAAVVAFTSNYVAETLALRSNMKFDQELRRKAPQWREFTGSDHVHQVEWTKWKYRMQALAELLNNALVQDRIVVMHNLRLRLGNGAAHEDTIGKLTRLKVGDAISTTDIDRASSEALWCALTRDPDYDPKTGLPENPNRTIRIHGTHLTASDEITVFPVAAASIPIRDGFAKLGSNYHHVRLFRVPSGKKYKYCLMQVYTVDLLKFRKEDLFTVELKPQTISVRTCEALLRKALANGTAEYLGWLVSDDELLIDTSSFDTPGIVKLREEYGPVNRWRLAGLTSVTRLNLRPLYLSKEGLKPNVNPEIKKIIDNRSWIITVNKLFSSGHVKIIRRDALGRPRLHSAAHLPICWEVK

SEQ ID NO: 170 - protein, 1134 aa, Streptococcus mitis
MNGLVLGLDIGIASEGVGILEKNSGKIIHANSRLFPAATADNNVERRKNRQARRLNRRKKHRGVRFQDLFEDYGLLTDFSKVSINLNPYRLRVDGLNQQLTNEELFIALKNIVKRRGISYLDDASEDGGAVSSDYGKAVEENRKLLAEQTPGQIQLERFEKYGQVRGDFTVVENGEKLRLINVFSTSAYKKEAERILRKQQEFNNQITDEFIEDYLKILTGKRKYYHGPGNEKSRTDYGRFRTDGTTLDNIFGILIGKCTFYPEEYRASKASYTAQEFNLLNDLNNLTVPTETKKLSEEQKKVIVEYAKEAKTLGASTLLKYIAKMIDASVDQIRGYRVDVNNKPEMHTFEVYRKMQSLETISVGELSRNVLDELAHILTLNTEREGMEEAINTKLKDSFSQDQVLELVQFRKNNSSLFSKGWHNFSLKLMMELIPELYETSEEQMTILTRLGKQKSKETSKRTKYIDEKELTEEIYNPVVAKSVRQAIKIINEATKKHGIFDNIVIEMARENNEEDAKKDYIKRQKANQDEKNAAMEKAAFQYNGKKELPDNIFHGHKELATKIRLWHQQGEKCLYTGKTIPISDLIYNQYKYEIDHILPLSLSFDDSLSNKVLALATANQEKGQRTPFQALDSMDDAWSYREFKSYVKDLKSLSNKKKDYLLTEEDISKIEVKQKFIERNLVDTRYSSRVVLNALQDFYKSHQFDTTISVVRGQFTSQLRRKWGLEKSRETYHHHAVDALIIAASSQLRLWKKQNNPLITYKEGQFVDSQTGEIISLTDDEYKELVFKAPYDHFVDTLSSKTFEDSILFSYQVDSKFNRKISDATIYATRKAKLDKEKKEYTYTLGKIKDIYSLGTKTPSKTGFYKFLDLYNKDKSQFLMFQKDRKTWDEVIEKIMEQYRPFKEYDKTGKLVDFNPFEKYRQENEPIRKYSKKGNGPEIKSLKYYDILLGKHKNITPEGSRNTVALLSLNPWRTDVYYNMETKKYEFLGLKYADLPFEEGGAYGISTETYNELREKEGIGKNSEFKFTLYKNDLILIKDTETNCQQIFRFWSRTGKDNPKSFEKHKIELKPYEKARFEKGEELEVLGKVPPSSNQLQKNMQIENLSIYKVKTDVLGNKHFIKKEGDKPKLKF

SEQ ID NO: 171 - protein, 1373 aa, Streptococcus bovis
MTKKNYSIGLDIGTNSVGWAVITDDYKVPAKKMKVLGNTDKKYIKKNLLGALLFDSGETAEATRLKRTARRRYTRRKNRLRYLQEIFAEEMTKVDESFFQRLDESFLRWDDDNKKLGRYPIFGNKADVVKYHQEFPTIYHLRKHLADSSEKADLRLVYLALAHMIKFRGHFLIEGELNAENTDVQKIFADFVGVYDRTFDDSHLSEITVDAASILTEKISKSRRLENLIKYYPTEKKNTLFGNLIALALGLQPNFKMNFKLSEDAKLQFSKDSYEEDLGELLGKIGDDYADLFTSAKNLYDAILLSGILIVDDNSTKAPLSASMIKRYVEHQEDLEKLKEFIKANKSELYHDIFKDKNKNGYAGYIENGVKQDEFYKYLKNTLSKIAGSDYFLDKIEREDFLRKQRTFDNGSIPHQIHLQEMHAILRRQGDYYPFLKENQDRIEKILTFRIPYYVGPLARKDSRFSWAEYHSDEKITPWNFDKVIDKEKSAEKFITRMTLNDLYLPEEKVLPKHSHVYETYAVYNELTKIKYVNEQGKDSFFDSNMKQEIFDHVFKENRKVTKEKLLNYLNKEFPEYRIKDLIGLDKENKSFNASLGTYHDLKKILDKAFLDDKVNEEVIEDIIKTLTLFEDKDMIHERLQKYSDIFTADQLKKLERRHYTGWGRLSYKLINGIRNKENNKTILDYLIDDGSANRNFMQLINDDTLPFKQIIQKSQVVGDVDDIEAVVHDLPGSPAIKKGILQSVKIVDELVKVMGDNPDNIVIEMARENQTTNRGRSQSQQRLKKLQNSLKELGSNILNEEKPSYIEDKVENSHLQNDQLFLYYIQNGKDMYTGDELDIDHLSDYDIDHIIPQAFIKDDSIDNRVLTSSAKNRGKSDDVPSLDIVRARKAEWVRLYKSGLISKRKFDNLTKAERGGLTEADKAGFIKRQLVETRQITKHVAQILDARFNTESDENDKVIRDVKVITLKSNLVSQFRKDFEFYKVREINDYHHAHDAYLNAVVGTALLKKYPKLASEFVYGEYKKYDIRKFITNSSDKATAKYFFYSNLMNFFKRVIRYSNGKVIVRPVVEYSKDTEDIAWDKKSNFRTICKVLSYPQVNIVKKVETQTGGFSKESILPKGDSDKLIPRKTKKAYWDTKKYGGFDSPTVAYSVFVVADVEKGKAKKLKTVKELVGISIMERSFFEENPVEFLENKGYHNIREDKLIKLPKYSLFEFEGGKRRLLASASELQKGNEMVIPGHLVKLLYHAQRINSFNSTKYLDYVSAHKKEFEKVLSCVEDFANLYVDVEKNLSKIRAVADSMDNFSIEEISNSFINLLTLTALGAPADFNFLGEKIPRKRYTSTKECLNATLIHQSITGLYETRIDLSKIGEE

SEQ ID NO: 172 - protein, 1099 aa, Corynebacterium accolens
MSLLYRVGIDVGTYSLGCTAIEVDDNDQPVSILSSVSLIHDSGLDPDQQKRAVTRLASSGVARRTRRLYRRRRRRMVKLENFLTAQGWETLPFERYSDPYLPWHARVALVNGYISDDTQRGQYLSIAFRHIANHRGWRNPYWKVSSLYSPDKPSDAFEQIRKELEASTGRQIPETATVGQLISFAQFGKDRLRGGGKQKDKKKPQEQVNQAVISARLHQIDHAREINEICRVQKIDDTLRKQILDLVFAAESPKGAQKGRVGKDPLQPKLFRALKASDAFQQYRIAALTGNLRIYRNGVTVPLDRDEKLIVFNYLVNLPKKEEPSWLKIAEILNIDRGQLRGTATMTDDGERAGATPPVHDTNRTILDSKVKPLAHWWENASDDERAAMLKSLSNSEVEDFDSPAGAQVQAFFADLDETEQEKLDSLHLPMGRAAYSEDTLMRLTNRMLDENLDLYEARLAEFGIPKDWAPPAPRIGEPVGNPAVDRVLKGVARWLEAAADEWGAPKSVVIEHVRDGFVSKSKAIEIDRANNNRHKRNRELFQKMQENLGIEGKVRSSDLWRYQSVQRQNCQCAYCGSPITYTTCEMDHIVPRAGEGSTNTRDNLVATCHRCNLAKKNIPFAVWAEKSTIPGVSVKEALDRTRHWSEDSGMSKKDFQKFRKNVCERLNRTVVDEPLDARSMESVAWMANELRGRVAQRFQEENTTVNVYRGALTAEARRAAGITDKLRFIDGTGKSRLDRRHHAVDAAVVAFIHNYVAETLAIRSNKKREAQLLQGTSQWKEFTGSDDKHRAVWNAWIPKMQKLAVLLQIALDEDRIVVTSNLRLRLGNGRAHEDTISELKTIRVGDAISVTDIDRASSEALWCALTREPDFDEKDGLPENPNRRIRVHGTWYDAEDEIEVFPVGAGAIKVRGGYAKLSRFHHARVYKIPGKKAPIYCMLRVYNTDLVQHRHEDLFSVELKPQTMSVRQAEPKLRKALAENTAEYLGWLVTDDELIIDTSTFRTGLIEEMQSEFGLVRRWRLDGFDSPSLLTLRPLHMSAEGLPDDCALGSRKIIDTKGWRVSINKVFNAGNTTVVRRDALGRARLTSNAHLPISWKEE

SEQ ID NO: 173 - protein, 1054 aa, Actinobacillus pleuropneumoniae
MKLTPLNYILGLDLGIASVGWAVVEIDEQENPLGLIDVGVRTFDRAEVAKTGESLALARRLARSSRRLVKRRADRIKKVKRLLKSENILLSADEQLPNDVWQLRVKGLDQKLERQEWAAVLLHLLKHRGYLSQRKNESKSENKELGALRSGVAANHQILQSAEYRTPAEIAVKKFHVEEGHIRNQRGAYTHTFSRLDLLAEIELLFTRQTELGNPHTSAKLLENLTALLMWQKPALAGEAILKMLGKCTFEPTEYKAAKNSYSAERFVWLTKLNNLRILEQGAERALTDNERFALLDQPYEKAKFTYAQARTMLALPDEAIFKGVRYQGEDKKAVETKTILMEMKAYHQIRKALENADLKAEWNELKNNSELLDDIGTAFSLHKTDEDICRYLDGKLSESILNALLENLNFDKFIQLSLKALQQILPLMLQGQRYDEAVSAIYGDHYGKKSAEINRLLPTIPADEIRNPVVLRTLTQARKVINAVVRLYGSPARIHIETGREVGKSYQDRKKLEKQQEDNRKHRESAVQKFKEYFPNFVGEPKGKDILKMRLYELQQAKCLYSGKSLELHRLLEKGYVEVDHALPFSRTWDDSFNNKVLVLANENQNKGNLTPYEWLDGKNNSEPWQNFVARVQTSGFSHTKKQRILSHKLDEKGFIERNLNDTRYVVRFLCNFIADNMLLTGKGKRKVFASNGQITALLRGRWGLQKVRDDNDRHHALDAVVVACSTVAMQQKITRFVRYEEGNVFSGERIDRETGEIIPLHFPSPWAFFRENVEIRIFSENPKLELENRLPDYPQYNHEFVQPLFVSRMPTRKMTGQGHMETVKSAKRLDEGLSVLKVPLTQLKLNDLERMVNREREMALYESLKVRLEQFDNDPAKAFAEPFYKKGGALVKAVRVEQTQKSGVLVRDGNGVADNASMVRVDVFTKAGKYFLVPIYTWQVAKGILPNKAVTANVDEIDWLEMDESYQFIFTMYPNDLVKVKLKKEEFFGYYGGLDRATGAIVIKEHDLEKSKGRQGIYRIGVKLALSFEKYQVDELGKNIRPCRPTKRQHVR

SEQ ID NO: 174 - protein, 1369 aa, Lactobacillus iners
MNNNYYLGLDLGTNSVGWAVTDDHYNIIKFHGKHMWGMRLFEEAETAKDRRLHRQARRRRQRLVERINLLEELFDKEISKVDQGFFARKKESDLHFEDKTTKSEYALFNDKSYTDRDYYKQYPTIFHLIMDLIENDKKRDIRLVYLACHYLIKHRGHFIFDGKNFTVDNSFENLLDKLITYLKDNDDITLSFPKDQLINIFKNSNLNSTEKSDQLKPFFGRTNLEKGIIKLLSGGKQDLSNMFRDETLKNSNYKNLKFSDNRFDDERDGYAADLGDRIDLLILLKQIYDASILESMMSQARVSIDGHKYISSAKVCAYEKHKSDLKRLKSLIKKYLPSEYNNIFRKITEKDNYVAYSKSNITNNKREKALKYVKYVDFTKYLTKKLKTIKTQDAEDDQEIFEIKGELEKQSFLPKQRTLDNSIIPYQLHLMELKKILDNQSKYYDFLLAKDDQEGITVKDKIISLLTFRLPYYIGPVNPAVHGKFAWVKRLANGKVTPWNYKEKIDIDASHEEFIKTKLSKCSFLIGCDVLPKNSLLYQKYMVLSELNTIKFNGVNISEKLKDDIYQNLFKNIQKVTKKRLQNYIKEHENIIGDVIVTGIDNAFKQGLVSYLKFKKIIGDKVDDDRYQKVLEKIIRDITLYDECAGKKIKKEYKDSDLFTEDELNKIVKLTFNDWGRLSAELLDQLEGEDTVSGETGKIIEFMQKHNYNLMQLMSKKFTFKSKIDEINKSYYQHDKFNYKSMIDSLYVSPATKRILWQSLKVVHEISKIMKHDPEKIFIEMARSKEDHPKRKLSRKADLKQVYKDSKKQIISIIGKDKYQDLSNELDNKDDRDLRWDNLYLYYTQLGRSMYSLKPIDISELMNKNLYDQDHIFPKSKKYDDSIENRVLVEKELNVKKSDIYPISDANIIPQKIKGQVESFWKMLYDHKLIGDKKYARLIRSKAFTDDELAGFIARQLVETRQATKETADLLKRLCPKSRIVYAKAQNASIFRQKFDIPKSRTINDLHHAQDAYLNIVVGNIFDTKFTQDPRNFIKNTKDSRNYNLEKIYDYNVERNNYVAWIAPDGETNGTIANVKCNLSTKDFRVTRPSFYKKGALFNQNLSRKGSNLAPIKEHSPKSNPLKYGGYSGKNNSFFVVVAGKDNKGKDIVKLIPVNTLIYNKMLHCDYKAKQELLTSYVANNFAINNFRIVKDDIKMYSLVKIDGAYYYLVGGTDERIEVKNAMQLLLSKDSIKAVKILEKESKDQFANIKNYKDIDIKLGRTFNEVVSKYTNSVFGKSMLISDKYRKDIFKSVEKSILEFNHLDTIGKADNLLKFVTLMRPSGSAHSLKMVGLIERIRKSNVISNFNEFKLINQSVTGLFENEEDLLKL

SEQ ID NO: 175 - protein, 1420 aa, Bifidobacterium bifidum
MSRKNYVDDYAISLDIGNASVGWSAFTPNYRLVRAKGHELIGVRLFDPADTAESRRMARTTRRRYSRRRWRLRLLDALFDQALSEIDPSFLARRKYSWVHPDDENNADCWYGSVLFDSNEQDKRFYEKYPTIYHLRKALMEDDSQHDIREIYLAIHHMVKYRGNFLVEGTLESSNAFKEDELLKLLGRITRYEMSEGEQNSDIEQDDENKLVAPANGQLADALCATRGSRSMRVDNALEALSAVNDLSREQRAIVKAIFAGLEGNKLDLAKIFVSKEFSSENKKILGIYFNKSDYEEKCVQIVDSGLLDDEEREFLDRMQGQYNAIALKQLLGRSTSVSDSKCASYDAHRANWNLIKLQLRTKENEKDINENYGILVGWKIDSGQRKSVRGESAYENMRKKANVFFKKMIETSDLSETDKNRLIHDIEEDKLFPIQRDSDNGVIPHQLHQNELKQIIKKQGKYYPFLLDAFEKDGKQINKIEGLLTFRVPYFVGPLVVPEDLQKSDNSENHWMVRKKKGEITPWNFDEMVDKDASGRKFIERLVGTDSYLLGEPTLPKNSLLYQEYEVLNELNNVRLSVRTGNHWNDKRRMRLGREEKTLLCQRLFMKGQTVTKRTAENLLRKEYGRTYELSGLSDESKFTSSLSTYGKMCRIFGEKYVNEHRDLMEKIVELQTVFEDKETLLHQLRQLEGISEADCALLVNTHYTGWGRLSRKLLTTKAGECKISDDFAPRKHSIIEIMRAEDRNLMEIITDKQLGFSDWIEQENLGAENGSSLMEVVDDLRVSPKVKRGIIQSIRLIDDISKAVGKRPSRIFLELADDIQPSGRTISRKSRLQDLYRNANLGKEFKGIADELNACSDKDLQDDRLFLYYTQLGKDMYTGEELDLDRLSSAYDIDHIIPQAVTQNDSIDNRVLVARAENARKTDSFTYMPQIADRMRNFWQILLDNGLISRVKFERLTRQNEFSEREKERFVQRSLVETRQIMKNVATLMRQRYGNSAAVIGLNAELTKEMHRYLGFSHKNRDINDYHHAQDALCVGIAGQFAANRGFFADGEVSDGAQNSYNQYLRDYLRGYREKLSAEDRKQGRAFGFIVGSMRSQDEQKRVNPRTGEVVWSEEDKDYLRKVMNYRKMLVTQKVGDDFGALYDETRYAATDPKGIKGIPFDGAKQDTSLYGGFSSAKPAYAVLIESKGKTRLVNVTMQEYSLLGDRPSDDELRKVLAKKKSEYAKANILLRHVPKMQLIRYGGGLMVIKSAGELNNAQQLWLPYEEYCYFDDLSQGKGSLEKDDLKKLLDSILGSVQCLYPWHRFTEEELADLHVAFDKLPEDEKKNVITGIVSALHADAKTANLSIVGMTGSWRRMNNKSGYTFSDEDEFIFQSPSGLFEKRVTVGELKRKAKKEVNSKYRTNEKRLPTLSGASQP

SEQ ID NO: 176 - protein, 1092 aa, Ilyobacter polytropus
MKYSIGLDIGIASVGWSVINKDKERIEDMGVRIFQKAENPKDGSSLASSRREKRGSRRRNRRKKHRLDRIKNILCESGLVKKNEIEKIYKNAYLKSPWELRAKSLEAKISNKEIAQILLHIAKRRGFKSFRKTDRNADDTGKLLSGIQENKKIMEEKGYLTIGDMVAKDPKFNTHVRNKAGSYLFSFSRKLLEDEVRKIQAKQKELGNTHFTDDVLEKYIEVFNSQRNFDEGPSKPSPYYSEIGQIAKMIGNCTFESSEKRTAKNTWSGERFVFLQKLNNFRIVGLSGKRPLTEEERDIVEKEVYLKKEVRYEKLRKILYLKEEERFGDLNYSKDEKQDKKTEKTKFISLIGNYTIKKLNLSEKLKSEIEEDKSKLDKIIEILTFNKSDKTIESNLKKLELSREDIEILLSEEFSGTLNLSLKAIKKILPYLEKGLSYNEACEKADYDYKNNGIKFKRGELLPVVDKDLIANPVVLRAISQTRKVVNAIIRKYGTPHTIHVEVARDLAKSYDDRQTIIKENKKRELENEKTKKFISEEFGIKNVKGKLLLKYRLYQEQEGRCAYSRKELSLSEVILDESMTDIDHIIPYSRSMDDSYSNKVLVLSGENRKKSNLLPKEYFDRQGRDWDTFVLNVKAMKIHPRKKSNLLKEKFTREDNKDWKSRALNDTRYISRFVANYLENALEYRDDSPKKRVFMIPGQLTAQLRARWRLNKVRENGDLHHALDAAVVAVTDQKAINNISNISRYKELKNCKDVIPSIEYHADEETGEVYFEEVKDTRFPMPWSGFDLELQKRLESENPREEFYNLLSDKRYLGWFNYEEGFIEKLRPVFVSRMPNRGVKGQAHQETIRSSKKISNQIAVSKKPLNSIKLKDLEKMQGRDTDRKLYEALKNRLEEYDDKPEKAFAEPFYKPTNSGKRGPLVRGIKVEEKQNVGVYVNGGQASNGSMVRIDVFRKNGKFYTVPIYVHQTLLKELPNRAINGKPYKDWDLIDGSFEFLYSFYPNDLIEIEFGKSKSIKNDNKLTKTEIPEVNLSEVLGYYRGMDTSTGAATIDTQDGKIQMRIGIKTVKNIKKYQVDVLGNVYKVKREKRQTF

SEQ ID NO: 177 - protein, 994 aa, Streptococcus downei
MENQRGKRQRITHQEPYSIGLDIGTASVGSAVINNDLTVPQKRFKVRDINGNVIKTIKKNMSSVLIFDEANPAKGARTKRTSRRRYTRRNFRLLELKKLFEKEIEKIDPNFFHRIKEDSFFNWNDKEFDKHPLFGNLKEEKKFHNNYPTVFHLRNEIGKNSSKKFDLRLVYLALAHIIKYRGHFLDETFDPDASVSVEKRLNDFIVEYNELFDKDLRSEAKFSEILMSDSSNSVKIESTLSLYPSEKNTIFQVFLKLIVGNQGDFNKFFKDELESSSHSGKLVFSSDEVEDEKEELISIIGEDYLDIINLCQSLYSTVALAKIISTDTGESNTPLSASMVKRYNEHKGDLANLKGIVKHFIPEKYEEVFGEHSKTGYTAYIRNPNKMPEKKFYDYLYHEGEKGKISGILSDSRIYELPAVQKFILKIEQKSFLKKQRTKENGLIPYQLHLKELKIIIENQSEYYPFLHEIEEKLEKLLTFRIPYFVGPLAQTKYINPRFNWLVRKSEDHIKPWNFSEIVDEEKSATKFIEKLISNDQFLFGEKVLPKRSIIYQQFLIFNELTKVSYQIKDGPSRNFDSETKEEIFNSLFKKNKLGCVTVVDLKNYIKNDQCLSEKEDIQIEGIKKKFNSSYSTYADLSEISGLKELLDDDTQLDLVEEIIRILTVFEDKKMRTKQLEKLNLPANVDIEKLCKKHYKGWANVSRQLIDGIADRSRGFKKTILDYLKDDDIPNNDAFSTKVQKSLNRNFAQLITDKSLDFARKLDESYKIDVKKDYPSLVEDIPGSPAIRRAILQSLYTVDEIIGVMGRMPKNIVIEMARTNEVSDSPKTRKERIKKLIKETENDADALNFGISKVSEIFDEVKKDENLFKELEVYLYFLQEGKDMYGTETREGHRQPKEINFYDVKNSTGKYHIDHIIPQSLYSGNPLDNIVLTESTNNKIKDKDVPDEATVYEMKNFWLYLMKKGAISKKKFSFLTKIEQGGLSNEDKFGFINR

SEQ ID NO: 178 - protein, 1052 aa, Aminomonas paucivorans
MIGEHVRGGCLFDDHWTPNWGAFRLPNTVRTFTKAENPKDGSSLAEPRRQARGLRRRLRRKTQRLEDLRRLLAKEGVLSLSDLETLFRETPAKDPYQLRAEGLDRPLSFPEWVRVLYHITKHRGFQSNRRNPVEDGQERSRQEEEGKLLSGVGENERLLREGGYRTAGEMLARDPKFQDHRRNRAGDYSHTLSRSLLLEEARRLFQSQRTLGNPHASSNLEEAFLHLVAFQNPFASGEDIRNKAGHCSLEPDQIRAPRRSASAETFMLLQKTGNLRLIHRRTGEERPLTDKEREQIHLLAWKQEKVTHKTLRRHLEIPEEWLFTGLPYHRSGDKAEEKLFVHLAGIHEIRKALDKGPDPAVWDTLRSRRDLLDSIADTLTFYKNEDEILPRLESLGLSPENARALAPLSFSGTAHLSLSALGKLLPHLEEGKSYTQARADAGYAAPPPDRHPKLPPLEEADWRNPVVFRALTQTRKVVNALVRRYGPPWCIHLETARELSQPAKVRRRIETEQQANEKKKQQAEREFLDIVGTAPGPGDLLKMRLWREQGGFCPYCEEYLNPTRLAEPGYAEMDHILPYSRSLDNGWHNRVLVHGKDNRDKGNRTPFEAFGGDTARWDRLVAWVQASHLSAPKKRNLLREDFGEEAERELKDRNLTDTRFITKTAATLLRDRLTFHPEAPKDPVMTLNGRLTAFLRKQWGLHKNRKNGDLHHALDAAVLAVASRSFVYRLSSHNAAWGELPRGREAENGFSLPYPAFRSEVLARLCPTREEILLRLDQGGVGYDEAFRNGLRPVFVSRAPSRRLRGKAHMETLRSPKWKDHPEGPRTASRIPLKDLNLEKLERMVGKDRDRKLYEALRERLAAFGGNGKKAFVAPFRKPCRSGEGPLVRSLRIFDSGYSGVELRDGGEVYAVADHESMVRVDVYAKKNRFYLVPVYVADVARGIVKNRAIVAHKSEEEWDLVDGSFDFRFSLFPGDLVEIEKKDGAYLGYYKSCHRGDGRLLLDRHDRMPRESDCGTFYVSTRKDVLSMSKYQVDPLGEIRLVGSEKPPFVL

SEQ ID NO: 179 - protein, 1023 aa, Helicobacter cinaedi
MKIYSFDIGVASIGWAFIENEVLQDCGIRIFTKAENPKNGASLALPRREARGVRKRLARRRGRLNTIKQLLCKEFGLQLEDYLSNDGELPKAYTASKANPLKSPYELRTLALSQKLDSKDLVRVILHIAKHRGYGNKHAKDSKDTESGKVKKAIEFNRKTLAEKGYRSVGEYLYREFFQQSRISQNNGATEFINVRNKAGNYEHCVAQDMLKEELESILNAQRQFGFSLKQDFENKLLTKIFEQRPLKSFADKVGNCCFIAGEKRAPKDSPSAIEFIALSRTINTLINLSKESGEIYNRAIILQIVESTLKKGEISYKELREIIRLDERLRFKDPRLDYSREIKEAEKVKFLEFKQLKGFKKALGESFTTLAISQLDEIAEHIALIKDRVKLNEKLESYALTKEQREALSNLSFSAHINLSLQALKQILPFMRGDNGEQCLDYDESVEKAGLKALSKDTLKGQMLPPLNEFEPYLSNPVVARALAEYRKVLNVLLKQYGSPHKIHIEYAREAKLSSTERQKYEKEQKDNYAANQAAHKKCQELGLEPSSTNLLKLKLWQEQGGLCLYSGAKITISYLQDPTALQVDHIYPYSRSFDDSYMNKCLVLTKANQEKGNRTPFEAFGTDSAKWGVITTLAQKLPHKKRRRILNTAFNDKEAGFKLRNLNDTSYIARLVADYTETYLEFLPLVESENTTLSKGQKGSKKHIAIVNGVLTSTMRYYLGFASKDRDNHLHHALDAVIIGFMNDSVIKAFSDFKKTQETSKAAYYAHTLSKQEYKKQRAFIQLPSGENFRVSVLEKVESVFVSKPPRKRVRGALHEATFYSPNDPKLLKNYGGTKGVERALALGKMRKVGAKIVSNGAMVRVDIFRHKSSGKFYGVPVYTMDFALGILPNKAVVVGKDQNGVIKDWLEMDSSYEFIFSLYKDDVILVQKKEMQRPELCYFVSFDTSGASIKVAKHDNNFSTLTENQKLLFSNATKEEVVGKSIGIQNLKVFEKWQVSVLGEVKRTQSYPRENISLASKAKK

SEQ ID NO: 180 - protein, 874 aa, Listeria seeligeri
LANGQSEFSWLTRKADGEIRPWNIEEKVDFGKSAIDFIEKMTNKDTYLPKENVLPKHSMCYQKYMVYNELTKIRYTDDQGKTHYFSGQEKQQIFNDLFKQKRKVKKKDLELFLYNMNHVESPTVEGVEDAFNSSFTTYHDLQKVGVPQEILDDPLNTEMLEEIIKILTVFEDKRMINERLQEFSNVLDEAVLKKLERRHYTGWGRLSAKLLIGIRDKESHLTILDYLMNDDKHNRNLMQLINDSNLSFKSIIEKEQVSTADKDIQSIVADLAGSPAIKKGILQSLKIVDELVGIMGYPPQTIVVEMARENQTTGKGKNNSKPRFTSLEKAIKELGSQILKEHPTDNQGLKNDRLYLYYLQNGKDMYTGQELDIHNLSNYDIDHVVPQSFITDNSIDNRVLASSAANREKGDNVPSLEVVRKRKVYWEKLYQAKLMSKRKFDYLTKAERGGLTEADKARFIHRQLVETRQITKNVANILHQRFNCKKDESGNVIEQVRIVTLKAALVSQFRKQFQLYKVREVNDYHHAHDAYLNCVVANTLLKVYPQLEPEFVYGDYHQFDWFKANKATAKKQFYTNIMLFFAKKDRIIDENGEILWDKKYLDTIKKVLNYRQMNIVKKTEIQKGEFSNATANPKGNSSKLIPRKADWDPIKYGGFDGSNMAYAIVIEHEKRKKKTVIKKELIQINIMERTAFEKDQKEFLEGKGYRNPKVITKIPKYTLYECENGRRRMLGSANEAQKGNQMVLPNHLMTLLYHAKNCEASDGKSLAYIESHREMFAELLDSISEFASRYTLADANLEKINTIFEQNKSGDVKVIAQSFVNLLEFNAMGAPASFKYFETNIERKRYNNLKELLNATIIYQSITGLYEARKRLDD

SEQ ID NO: 181 - protein, 1082 aa, Neisseria lactamica
MAAFKPNPMNYILGLDIGIASVGWAMVEIDKEENPIRLIDLGVRVFERAEVPKTGDSLAMARRLARSVRRLTRRRAHRLLRARRLLKREGVLQDADFDENGLVKSLPNTPWQLRAAALDRKLTCLEWSAVLLHLIKHRGYLSQRKNEGETADKELGALLKGVADNAHALQTGDFRTPAELALNKFEKESGHIRNQRGDYSHTFSRKDLQAELNLLFEKQKEFSNPHVSDSLKEGIETLLMAQRPALSGDAVQKMLGHCTFEPAEPKAAKNTYTAERFIWLTKLNNLRILEQGSERPLTDTERATLMDEPYRKSKLTYAQARKLLGLEDTAFFKGLRYGKDNAEAPTLMEMKAYHAISRALEKEGLKDKKSPLNLSTELQDEIGTAFSLFKTDKDITGRLKDRVQPEILEALLKHISFDKFVQISLKALRRIVPLMEQGKRYDEACAEIYGDHYCKKNAEEKIYLPPIPADEIRNPVVLRALSQARKVINCVVRRYGSPARIHIETAREVGKSFKDRKEIEKRQEENRKDREKAAAKFREYFPNFVGEPKSKDILKLRLYEQQHGKCLYSGKEINLVRLNEKGYVEIDHALPFSRTWDDSFNNKVLVLGSENQNKGNQTPYEYFNGKDNSREWQEFKARVETSRFPRSKKQRILLQKFDEEGFKERNLNDTRYVNRFLCQFVADHILLTGKGKRRVFASNGQITNLLRGFWGLRKVRAENDRHHALDAVVVACSTVAMQQKITRFVRYKEMNAFDGKTIDKETGEVLHQKAHFPQPWEFFAQEVMIRVFGKPDGKPEFEEADTPEKLRTLLAEKLSSRPEAVHEYVTPLFVSRAPNRKMSGQGHMETVKSAKRLDEGISVLRVPLTQLKLKGLEKMVNREREPKLYDALKAQLETHKDNPAKAFAEPFYKYDKAGNRTQQVKAVRIEQVQKTGVWVRNHNGIADNATMVRVDVFEKGGKYYLVPIYSWQVAKGILPDRAVVAFKDEEDWTVMDDSFEFRFVLYANDLIKLTAKKNEFLGYFVSLNRATGAIDIRTHDTDSTKGKNGIFQSVGVKTALSFQKNQIDELGKEIRPCRLKKRPPVR

SEQ ID NO: 182 - protein, 1326 aa, Streptococcus pseudoporcinus
MLGTVLFDSGETAQARRLKRTNRRRYTRRRYRLCQLQNIFATEMVKVDDTFFQRLSESFFYYQDKAFDKHPIFGNSKEERAYHKTYPTIYHLRKDLADRDQKADLRLIYLALSHIIKFRGHFLIEGKLNSENTDVQKLFIALVTVYNLLFEEEPIAGETCDAKALLTAKTSKSKRLESLISEFPGQKKNGLFGNLLALALGLRPNFKSNFGLSEDAKLQITKDTYEEELDNLLAEIGDHYADLFLAAKNLSDAILLSDILTLSDENTRAPLSASMIKRYEEHQEDLALLKKLVKEQMPEKYWEIFSNAKKNGYAGYIEGKVSQEDFYRYIKPILSRLKGGDEFLAKIDRDDFLRKQRTFDNGSIPHQIHLKELHAILRRQEKYYPFLAEQKEKIEQLLCFRIPYYVGPLAKGGNSSFAWLKRRSDEPITPWNFKDVVDEEASAQAFIEGMTNYDTYLPEEKVLPKHSPLYEMFTVYNELTKVKYIAENMTKPLYLSAEQKEAIIDHLFKQTRKVTVKDLKEKYFSQIEGLENVDVTGVEGAFNASLGTYNDLLKIIKDKAFLDDEANAEILEEIVLILTLFQDEKLIEKRLAKYANLFEKSVLKKLRKRHYRGWGRLSRQLIDGMKDKASGKTILDFLKADDFANRNFIQLINDSSLDFEKLIDDAQKKAIKRESLTEAVANLAGSPAIKKGILQSLKVVDEIVKVMGHNPDNIVIEMSRENQTTAQGLKNARQRLKKIKEVHKKTGSRILEDNSERITNLTLQDNRLYLYLLQDGKDMYTGQDLDINNLSQYDIDHIIPQSFIKDNSIDNLVLTTQKANRGKSDNVPSIEVVRDMKDRVWRRQLANGAISRQKFDHLTKAERGGLADSDKARFLRRQLVETRQITKHVAQLLDSRFNSKSNQNKKLARNVKIITLKSKIVSDFRKDFGLYKLREVNNYHHAHDAYLNAVVGTALLKKYPKLEAEFVYGDYKHFDLVKLISKSDPSLGKATAKVFFYSNIMNFFKEELSLADGTLMKRPVIETNTETGEVVWDKVKDFKTIRKVLSYPQVNIVKKTEIQSGAFSKESVLSKGNSDKLIERKKGWDPKKYGGFDSPNTAYSIFVVAKVAKRKAQKLKTVKEIVGITIMEQAEYEKDNIAFLEKKGYQDIQEKLLIKLPKYSLFELENGRRRLLASANEFQKGNELALSGKYMKFLYLASRYDKLSSKIESEQQKKLFVEQHLHYFDEILDIVVKHATCYIKAENNLKKIISLYKKKEAYSINEQALNMLNLFIFTSLGAPSTFVFFDETIDRKRYTTSSDVLNGILIQQSITGLYETRIDLSRFGGD

SEQ ID NO: 183 - protein, 1150 aa, Enterococcus faecalis
MYSIGLDLGISSVGWSVIDERTGNVIDLGVRLFSAKNSEKNLERRTNRGGRRLIRRKTNRLKDAKKILAAVGFYEDKSLKNSCPYQLRVKGLTEPLSRGEIYKVTLHILKKRGISYLDEVDTEAAKESQDYKEQVRKNAQLLTKYTPGQIQLQRLKENNRVKTGINAQGNYQLNVFKVSAYANELATILKTQQAFYPNELTDDWIALFVQPGIAEEAGLIYRKRPYYHGPGNEANNSPYGRWSDFQKTGEPATNIFDKLIGKDFQGELRASGLSLSAQQYNLLNDLTNLKIDGEVPLSSEQKEYILTELMTKEFTRFGVNDVVKLLGVKKERLSGWRLDKKGKPEIHTLKGYRNWRKIFAEAGIDLATLPTETIDCLAKVLTLNTEREGIENTLAFELPELSESVKLLVLDRYKELSQSISTQSWHRFSLKTLHLLIPELMNATSEQNTLLEQFQLKSDVRKRYSEYKKLPTKDVLAEIYNPTVNKTVSQAFKVIDALLVKYGKEQIRYITIEMPRDDNEEDEKKRIKELHAKNSQRKNDSQSYFMQKSGWSQEKFQTTIQKNRRFLAKLLYYYEQDGICAYTGLPISPELLVSDSTEIDHIIPISISLDDSINNKVLVLSKANQVKGQQTPYDAWMDGSFKKINGKFSNWDDYQKWVESRHFSHKKENNLLETRNIFDSEQVEKFLARNLNDTRYASRLVLNTLQSFFTNQETKVRVVNGSFTHTLRKKWGADLDKTRETHHHHAVDATLCAVTSFVKVSRYHYAVKEETGEKVMREIDFETGEIVNEMSYWEFKKSKKYERKTYQVKWPNFREQLKPVNLHPRIKFSHQVDRKANRKLSDATIYSVREKTEVKTLKSGKQKITTDEYTIGKIKDIYTLDGWEAFKKKQDKLLMKDLDEKTYERLLSIAETTPDFQEVEEKNGKVKRVKRSPFAVYCEENDIPAIQKYAKKNNGPLIRSLKYYDGKLNKHINITKDSQGRPVEKTKNGRKVTLQSLKPYRYDIYQDLETKAYYTVQLYYSDLRFVEGKYGITEKEYMKKVAEQTKGQVVRFCFSLQKNDGLEIEWKDSQRYDVRFYNFQSANSINFKGLEQEMMPAENQFKQKPYNNGAINLNIAKYGKEGKKLRKFNTDILGKKHYLFYEKEPKNIIK

SEQ ID NO: 184 - protein, 1150 aa, Enterococcus faecalis
MYSIGLDLGVSSVGWSVIDERTGNVIDLGVRLFSAKNSEKNLERRTNRGGRRLIRRKTNRLKDAKKILAAVGFYEDKSLKNSCPYQLRVKGLTEPLSKGEIYKVTLHILKKRGISYLDEDDTEAAKESQDYKEQVRENAQLLTKYTPGQIQLQRLKENNRVKTGINAQGNYQLNVFKVSAYANELATILKTQQAFYPNELTDDWIALFVQPGIAEEAGLIYRKRPYYHGPGNEANNSPYGRWSDFKKTGQPATNIFDKLIGKDFQGELRASGLSLSAQQYNLLNDLTNLKIDGEIPLSPEQKEYILAELMTKEFTRFGINDVAKLLGVKKERLSGWRLDKKGKPEIHTLKGYRNWRKIFAESGIDLATLPTETIDCLAKVLTLNTEREGIENTLAFELPELAESVKLLVLDRYKELSQSVSTQAWHRFSLKTLHLLIPELMNATSEQNTLLEQFQLKSDVRKRYSEYKKLPTKDVLTEIYNPTVNKTVSQAFKVIDALLVKYGKEQIRYITIEMPRDDNEEDEKKRIKELHAKNSQRKNDSQSYFMQKSGWSQEKFQTTIQKNRRFLAKLLYYYEQDGICAYTGLSISPELLVSDSTEIDHIIPISISLDDSINNKVLVLSKANQVKGQQTPYDAWMDGSFKKINGKFSNWDDYQKWVESRHFSHKKENNLLETRNIFDSEQVEKFLARNLNDTRYASRLVLNTLQSFFANQETKVRVVNGSFTHTLRKKWGADLDKTRETHHHHAVDATLCAVTPFVKVSRYHYAVKEETGEKVMREIDFETGEIVDEMSYREFKKSKKYERKTYQVKWPNFREQLKPVNLHPRIKFSHQVDRKANRKLSDATIYSVREKTEVKTLKSGKQKITTDEYTIGKIKDIYTVDGWEAFKKKQDKLLMKDLDEKTYERLLSIAETTPDFQEVEEKNGKVKRVKRSPFAVYCEENDIPAIRKYAKNNNGPLIRSLKYYDGKLNKHINITKDSQGRPVEKTKNGRKVTLQSLKPYRYDIYQDLETKAYYTVQLYYSDLRFVEGKYGITEKEYMKKVAEQTKGQVVRFCFSLQKNDGLEIEWKDSQCYDVRFYNFQSANSINFKGLEQEMMPAENQFKQKPYNNGAINLNIAKYGKEGKKLRKFNTDILGKKHYLYYEKEPKNIIK

SEQ ID NO: 185 - protein, 1345 aa, Streptococcus anginosus
MDQKYSIGLDIGTNSVGWAVVTDDYKVPAKKMKVLGNTDKQSIKKNLLGALLFDSGETAEATRLKRTARRRYTRRRNRLRYLQEIFAEEMNKVDENFFQRLDDSFLVDEDKRGERHPIFGNIAAEVKYHDDFPTIYHLRKHLADISQKADLRLVYLALAHMIKFRGHFLIEGQLKAENTNVQALFKDFVEVYDKTVEESHLSEMTVDALSILTEKVSKSRRLENLIAHYPAEKKNTLFGNLIALSLGLQPNFKTNFQLSEDAKLQFSKDTYEEDLEGLLGEIGDEYADLFASAKNLYDAILLSGILTVDDNSTKAPLSASMVKRYEEHQKDLKKLKDFIKVNAPDQYNAIFKDKNKKGYAGYIENGVKQDEFYKYLKGILLQINGSGDFLDKIDREDFLRKQRTFDNGSIPHQIHLQEMHAILRRQEEHYPFLKENQDKIEKILTFRIPYYVGPLARKGSRFAWAEYKADEKITPWNFDDILDKEKSAEKFITRMTLNDLYLPEEKVLPKHSLLYETFTVYNELTKVKYVNEQGEAKFFDANMKQEIFDHVFKENRKVTKDKLLNYLNKEFEEFRIVNLTGLDKENKAFNSSLGTYHDLRKILDKSFLDDKANEKTIEDIIQTLTLFEDREMIRQRLQKYSDIFTKAQLKKLERRHYTGWGRLSYKLINGIRNKENKKTILDYLIDDGYANRNFMQLINDDALSFKEEIARAQIIGDVDDIANVVHDLPGSPAIKKGILQSVKIVDELVKVMGHNPANIIIEMARENQMTDKGRRNSQQRLKLLQDSLKNLDNPVNIKNVENQQLQNDRLFLYYIQNGKDMYTGETLDINNLSQYDIDHIIPQAFIKDNSLDNRVLTRSDKNRGKSDDVPSIEVVHEMKSFWSKLLSVKLITQRKFDNLTKAERGGLTEEDKAGFIKRQLVETRQITKHVAQILDERFNTEFDGNKRRIRNVKIITLKSNLVSNFRKEFELYKVREINDYHHAHDAYLNAVVGNALLLKYPQLEPEFVYGEYPKYNSYRSRKSATEKFLFYSNILRFFKKEDIQTNEDGEIAWNKEKHIKILRKVLSYPQVNIVKKTEEQTGGFSKESILPKGESDKLIPRKTKNSYWNPKKYGGFDSPVVAYSILVFADVEKGKSKKLRKVQDMVGITIMEKKRFEKHPVDFLEQRGYRNVRLEKIIKLPKYSLFELENKRRRLLASARELQKGNELVIPQRFTTLLYHSYQIEKNYEPEHREYVEKHKDEFKELLEYISVFSRKYVLADNNLTKIEMLFSKNKDAEVSSLAKSFISLLTFTAFGAPAAFNFFGENIDRKRYTSVTECLNATLIHQSITGLYETRIDLSKLGED

SEQ ID NO: 186 - protein, 849 aa, Listeria ivanovii
  misc_feature (780)..(780): Xaa can be any naturally occurring amino acid
LIDKNGTPQHITMIDKMRGKCTYFPEEVRIAKMSYTAELFGLLNDFNNIYFADPETGEKIGFTEADKKYFIDTFIHDQKGVKNITLKQIMKHKNIINETDIFGYRINTKNGTPIFTEFKGLKALKKALKEVDLPDEFYQNTEMMDEIANILSSEKSFTRREEQLKELFLAAFNDELEEAVKELINDITFKEFHSLSKKAIMVILPELWSTNQNQMQLFVQHKMDKSRLENLQNGTKIQFDDEAILSTIAKRAHRETIKIVDAVRAKYGELDYVIVEMAREKNSDEQKKVYNRAQKKQGDFEKEMCKLLGVSELKELRLNGKQHLALKFWKEQDGKCIYSGKPIALSDIVNNFNGLLEIDHIIPISISYDDSQQNKVLCLRSENQRKGQLSPYQYLIRGMGERSFDAFKAEVLSRHFGKKKQNYLLEMEDIANNDELRKHFINRNLVDTRYAMRTFSNTLKTFYTVNGIPTKVMPVNGAMTSALRKRAKLNKDRDAGHAHHAIDALIVAAIGRLPLIKQLAELRVNEEGEFADKITDKGLDDKTAFDDKTLKFLRNLLNYESKVKYSHKVDRKPNRSLSKQTLYSTREKDGEKYIIGKVKNIYTLDKAGYAALKKRIDKNPEDFLMAQHNPKTWEEIIKIMEVYSKADNPFKEFYDEHGFIMKDGKVPVKSLRYHDKKLGIHVPLTHKYENTRHDVVLLKRNSLRVDIYMNKEGVYKYQGVPYNWFNQKGDKYILDMEKYHNEIDGTRASFKNIDNTFEFQFSLYKNDVFSYMKKDKEGEXVSYTKLFRSDSSPRENRLEVENIDMRTSSQQMPTINPLKNLIKYNTDILGNTYPIQKEKFVTVFTLHSK

SEQ ID NO: 187 - protein, 1457 aa, Prevotella buccae
MKTILGLDLGTNSIGWAKVSVDDYGNYLHDIKLGSRIIPMSQDVLGNFDSGVTVSQTAQRTEFRSKRRLVQRNLQRRERLHRVLHVLDFLPAHYDAAIGWDRTEAVTYGKFLNHAEPKLAWEELGNGKRRFLFMDSFHEMVADFARCQPALVADGKKIPLDWTIYYLRKKALTQAITKEELAWILLNFNQKRGYYQLRGEEEEENPTKQEEYYELKVVSVEATDSRKGNDTWYNVHLENGWIYRRSSKISLDDWVGKVKQFIVTTEYEKDGATLKTDKEGYVKRSFRAPNENDWGLRKKRTETLLEMSGKTVGAFIYDHLLQEPADKIRGNFIRTIERHYYKAELEAILAEQCKYHIELRDKEMLEACARELYLNNLPHQRSLMKKDMTYLLLYDLIFYQRPLKSKKALIANCPYEYYEYVDKETGEIKRQNIKCIAKSNPYFQEFRLWQFVLNLRLFDRVEDKEVTANYLPTADDHARLFTYLNDRKEINQETLLKDYFKLKKVKIGNEKEYPIRWNYIEDKEKKYPCNETRYELLMALDRAGIEHKWLDDNNLEYRLWHLLYSVEVKSESETALRKLKNDDAFVNSFLKVKPFKKEYGAYSEKAIKRLLAVMRKGFLWNEQDICDETRKRIEIIIKGDVDEKVKERMGHAAYSFDRVSDFQGLPEWLACYVVYGRHSEAMDIQHWDSPERLMAYINNFKQYSLRNPIVEQCILETLRTVHDIWKETGQIDEIHVELGREMKSTSEERARRTQNVLRNENTNLRIKSLLIELKNDTDICNVHPYSPMQQEILRIYEEGALQELNREDEDFEEISKISQMSQPSGKELNRYKLWLEQKYRSPYTGKAISLAKLFTPAYQIEHVIPQSRYFDDSFTNKVICEAEVNTLKSNLLGYEFIKKHGGEIIHCTTLGDVRIFSESEYKAFVMDHYANNKSKKDKLLMEDIPQEFLSRQMNDSRYISKVVKTLLSNIVRMADESEATSKSVIVCTGGVTDRLKKDWGLNDVWNSIVYSRFERLNRLTGTEAFGHWENKDGKRVFQTSMPLELQRGFRKKRIDHRHHAMDALVIACASRNIVNYLNNESANNPKKREDLRRQLCDKNRVIRKPWETFTQDAYNALENVVVSFKNYVRVINKATNRYEHYDENGKKRFVQQKGSELWAIRKPMHKETYYGHVNLRRKELVTLQKALDDIPSICDKKLRDYISALVEKHFNKRQLLAHFKSTDYYWQKQYVNKVYVWTFSDDIKPLVATRKLLDTSFDAKRIGTITDTGIQKILRNYLEAKGGNATLAFTPEGIAEMNQNISKYNDGKPHQPILKVRITEPMGAKYRVGQTGNKMAKYVEAQSGTNLYFAIYEDSEGKRSYTTVPLDEVAERLKQRLSPVPEKDENDVPLKFYLSPNDLVYVPTEEELQLRECKLNKDRIYKMVSSTGNECHFIPYYVANVIYNKGGFNMQMHRPQS

SEQ ID NO: 188 - protein, 1330 aa, Enterococcus italicus
MKNDYTIGLDIGTNSVGYSVVTDDYKVISKKMNVFGNTEKKSIKKNFWGVRLFESGQTAQEARMKRTSRRRIARRKNRICYLQEIFQPEMNHLDNNFFYRLNESFLVADDAKYDKHPIFGTLDEEIHFHEQFPTIYHLRKYLADGDEKADLRLVYLAIAHIIKFRGNFLIEGELNTENNSVIELSKVFVQLYNQTLSELEGFQFIDESIDFSEVLTQQLSKSERADNVLKLFPDEKGTGIFAQFIKLIVGNQGNFKKVFQLEEDQKLQLSTDDYEENIENLLAIIGDEYGDIFVAAQNLYQAILLAGILTSTEKTRAKLSASMIQRYEEHAKDLKLLKRFVKEHIPDKYAEIFNDATKNGYAGYIDGKTKEEEFYKYLKTTLVQKSGYQYFIEKIEQENFLRKQRIYDNGVIPHQVHAEELRAILRKQEKYYSFLKENHEKIEQIFKVRIPYYVGPLAKHNEQSRFAWNIRKSDEPIRPWNMNDVVDENASAVAFIERMTIKDIYLNENVLPRHSLIYEKFTVFNELTKVLYADDRGVFQRFSAEEKEDIFEKLFKSERKVTKKKLENYLRIELSISSPSVKGIEEQFNANFGTYLDLKKFDELHPYLDDEKYQDTLEEVIKVLTVFEDRSMIQNQLEQLPLNLSTKTIKALSRRKYTGWGRLSARLIDGIHDKNSGKTILDYLIEDESDSYIVNRNFMQLINDDHLSFKKIIEDSQPYKEQQSAEEIVSELSGSPAIKKGILQSLKIVDELVAIMGYKPKNIVVEMARENQTTGRGKQNSKPRLKGIENGLKEFSDSVLKGSSIDNKQLQNDRLYLYYLQNGKDMYTGHELDIDHLSTYDIDHIIPQSFLTDNSIDNRVLTTSKSNRGKSDNVPSEEVVRKMDRFWRKLLNAKLISERKYTNLTKKELTESDKAGFLKRQLVETRQITKHVATILDSKFNEDSNNRDVQIITLKSALVSEFRKTFNLYKVREINDLHHAHDAYLNAVVALSLLRVYPQLKPEFVYGEYGKNSIHDQNKATIKKQFYSNITRYFASKDYIINDDGEILWNKQETIAQVIKTLGMHQVNVVKKVEIQKGGFSKESIQPKGESQKLIRRKQQWNTKKYGGFDSPVVAYAILLSFDKGKRKARSFKIVGITIQDRESFEGNPILYLSKKDYHNPKVEAILPKYSLFEFENGRRRMVASASETQKGNQLIIPGHLMELLYHSKKIINGKNSDSVSYIQNNKEKFREIFEYIVDFSSKYISADANLNKIEKIFENNFHKASEQEIAKSFINLLTFTAMGAPADFEFFGEKIPRKRYVSISEIIDAVFIHQSITGLYETRVRLTEV

SEQ ID NO: 189 - protein, 1123 aa, Mobiluncus curtisii
MFVYLNSPRGFGPATFLTDLPHFCIIFGNNDFMDNRKYHVGIDVGTNSVGFAAVEVGDSGSPIRFLNTMVVIHDSGVDPEQKKYAITRLASAGTARRTRRLYRTRRQRLRELDDFISNELGYPLVNLENFADPYEPWKVRADLATIKLPADELPEAMSIALRHMARHRGWRSPYQRVEALHLHAEISEEFSALKKRVMEKTGDVFSDDATPAEVLVDLMGRQKIRGADGMLSGKLRQSDNANELRKIASVQGIDDETLNRIIDRVFFSRSPKGKASERVGMDALPGQGSKPRALKAMPSFQKFRIVSVICNLRIKDSGDDNRPLSMEEKEQLIGYLMSSTTDDHVTWTDVAELLHVKRSNLQGTAKEGPDGERPYTRPPVNSAWSKIKDSKIKSLVALWKTGDVDVQSAIVEALSNASVLEDARPGADIVVAYLESLDDKELESLDKVGLPAGRASYSEDSLERLTERMLQDDCDLFEARKREFGVSDDWKPPADPIYAPVGNPGVDRVLKIVNRLLMAAEREWGAPTQINIEHVRSGFSSELMQREFERENERRRAQNEEAVKAILTEKGGNSHVSKYDIIRYYAVKRQNCQCLYCGTPITFSDCELDHIVPRKGVGSTNSRVNLAAACRSCNRDKSNLPFAVWAGKTSNFDVSIDGAVSRVKQWQRSQNEGAREFRAFQNEVISRLLKTTEDPEIDSRSLESVAWMARELHHRVEYYFQSKGAQTQVSVYRGAVTAQARKSSGLEDKVKMIGGGGKTRLDRRHHAMDAATIALMTPGISTTLSEKNNLRDAQKFTGQSETWKDYCGRTETAREHFAVWKSNMERLTDLFNDKLENDAIPVVQPLRLRLSDSKAHDDGIGKLDSKKLGSVWSLADIDRAATPQIWTALTRCDDFDPTKGLPENANRVIRAQGVKYESEDNIPVFPSNVAAIAVRDGYAEIGSTIHHARIYRIDDGKKIFYSMIRVFAVDLLKHQAEDLFTVKLPPSAISIRTCEDSLRRALSNGTAEYLGWLVPGDEIIVDTSDKAFHTGQIGDLLRNFPVNSFRLTGFPSNSRLRLKPVLLAGEGLRDDAEDSIKKILSGQGWRPAINVLFSKGKPRIVRRNSLGIERPSSNNGLPFSWEA

SEQ ID NO: 190 - protein, 1054 aa, Staphylococcus lugdunensis
MNQKFILGLDIGITSVGYGLIDYETKNIIDAGVRLFPEANVENNEGRRSKRGSRRLKRRRIHRLERVKKLLEDYNLLDQSQIPQSTNPYAIRVKGLSEALSKDELVIALLHIAKRRGIHKIDVIDSNDDVGNELSTKEQLNKNSKLLKDKFVCQIQLERMNEGQVRGEKNRFKTADIIKEIIQLLNVQKNFHQLDENFINKYIELVEMRREYFEGPGKGSPYGWEGDPKAWYETLMGHCTYFPDELRSVKYAYSADLFNALNDLNNLVIQRDGLSKLEYHEKYHIIENVFKQKKKPTLKQIANEINVNPEDIKGYRITKSGKPQFTEFKLYHDLKSVLFDQSILENEDVLDQIAEILTIYQDKDSIKSKLTELDILLNEEDKENIAQLTGYTGTHRLSLKCIRLVLEEQWYSSRNQMEIFTHLNIKPKKINLTAANKIPKAMIDEFILSPVVKRTFGQAINLINKIIEKYGVPEDIIIELARENNSKDKQKFINEMQKKNENTRKRINEIIGKYGNQNAKRLVEKIRLHDEQEGKCLYSLESIPLEDLLNNPNHYEVDHIIPRSVSFDNSYHNKVLVKQSENSKKSNLTPYQYFNSGKSKLSYNQFKQHILNLSKSQDRISKKKKEYLLEERDINKFEVQKEFINRNLVDTRYATRELTNYLKAYFSANNMNVKVKTINGSFTDYLRKVWKFKKERNHGYKHHAEDALIIANADFLFKENKKLKAVNSVLEKPEIESKQLDIQVDSEDNYSEMFIIPKQVQDIKDFRNFKYSHRVDKKPNRQLINDTLYSTRKKDNSTYIVQTIKDIYAKDNTTLKKQFDKSPEKFLMYQHDPRTFEKLEVIMKQYANEKNPLAKYHEETGEYLTKYSKKNNGPIVKSLKYIGNKLGSHLDVTHQFKSSTKKLVKLSIKPYRFDVYLTDKGYKFITISYLDVLKKDNYYYIPEQKYDKLKLGKAIDKNAKFIASFYKNDLIKLDGEIYKIIGVNSDTRNMIELDLPDIRYKEYCELNNIKGEPRIKKTIGKKVNSIEKLTTDVLGNVFTNTQYTKPQLLFKRGN

SEQ ID NO: 191 - protein, 586 aa, Pseudoramibacter alactolyticus
MTYYLGLDMGTGSVGWAATDKNYKLIRAKGKDLWGVRLFQTAKTAAERRSHRVARLRRQREKVRIGYLKTIFSDAINKVDPGFFQRLDDSFFYAEDKNINQPYALFADTGYTDVDYYRDYPTIFHLRSTLIHDTSPKDVRLVYLAVLNMFKHRGHFLASNLSENGVDDFGDIYQQWCKSVPKPVQISDPEAKTEKIENILSKAGISNTRRLEALLEVFGIKRRDAFAEVLKLWCGLKGNLSKIWSETDFSDLDNTKPALSFKDSNLDMVLSQLEEILPDEDYSWLMLTKQIYDWSLLSGMMKDASGKSYDYLSDARVASYQKHSEDLKTLKRFYHDNHLSAAYDQMFRVMGKDNYSAYAGSVQSKKEVVRRGASCGIEELYKRIKKDLKPVPDCETKQIILENIERGTFLPKQLTRDNGVIPNQIHVHELKAILKNAENYLPFLKEGSELTNSEKILQLFQFQIPYYVGPLYSDENNYAWVVRKEGGRVFPWNFAEKVDEKASAEGFISELVARCTYLDNEKVLPKASLLYEKFMVLNELNNLRINGERISVDIKQELYQNLFTRGKKVTLKKSEGLFGGQRIFCL

SEQ ID NO: 192 - protein, 1385 aa, Gemella morbillorum
MKNKTWYLGLGVGPTSIGWAATDSNYKLLRKNKKRLWGVRLFEEAKTAVDRRTFRAERRRLARRKWRISLLEELFAKEVSKNDPNFFLRLKESKYHFEDKSLMNEYILFNDKDYTDKDYYKEYPTIYHLRLSLTTEENPDIRKVYLAVHSMLKNRGHFLLQGQSFNDSNIDSVIKELLELETVKINFEVTDEVIHSLKKIALEKKNLSDKNNDVKKLYPKEKQLQEIFKLVFGGKTSLDKLYDIEEYKELDNSVKSISFKEKVYEEVRPDYEQILSNYIELLDLAKLVYDSIVLADIKKEGKTISESKVELYNKHKDDLANLKKLVKIDSKLSEDKKKEVYFTIFKEDKEKGTNYVNYTHRSQEGKSCSYEDFKKFLKKELEKLEDSPTKTTILEELDLETFLPLQRTKDNSVVPYQIHKEELVKILDNAAKYHSFLAEKDDSGYSTREKVVQLFEFRIPYYIGPLNAHHNTENGGYSWAIRKKGMESVPVTPWNFKDVIDESASAEAFVNNLKNKCAYLSGEDVLPKNSLLYSEYALLNELNALRYEGNRISVEARDVIVTKLFKEQGKKVTKKTIKELLKTEGFIDGKGEIVGIDNIVKNDLKSYRDFKKILADKFDKERVENIILWITLYGESRKLIKEKITKVYGDFYTVDEIEKMSRLTYKDWGILSRKLLTELVSEKLYNEETGECLNIIGAMRQGTILFMELLADKFDYMSQIKNHNKENKDDITEITPDILENLHASPAVKRSIWQTVRIVEELKTIIGCVPTKIFIETTKRNNAPYKVPTLNRNDLVTKYKTIREHEIFELEKELKNTLDFTLNKNRLINEEPSKLKATKLYLYYTQLGRCMYTGKKIDLGELFDNNNKYDIDHIYPQSKVKDGSFNNIVLVTKASNDMKADVFPLKSKFQTKENKIFWRFLKEKKLITEEKYNRLVRTEEFSNGELTGFITRQLVETSQAIKVISNVLRELNPETTICYSKAENVSSFRQSFGKIKEANRKAENNEKLIRVQEINDYYNAKDAYLSIVVGNVYDVKFTRNVHNFIKNNKDARRYSLNGLFYTDVKNANTIAWEMDKTVHVVEKTMNNNNILITRRTSEQKGALYDATLYKAKVAEKAKEGTYYPLKTTDSKIKDVGKYGGFTKIKIAYYSIFEYTLDGKKGKQKITRIVPIPIYISQNIKDDKALLEYAQTRLPGKDLKIKYRKLCIGSLVKINNFNYYIGGKTNNNFTFDSAVQVILDKDSESYIKELAKYLNWKKENKDGKLWESITEDKNIQLYDSLVKKMNTGIFIRKTPNKYTELLTLEVKNKFINIDIDEQVKLLLEILNLLTNKKFTSKLNEIGITASRGVCSFNLSNQSQFSIIEQSVTGVYEKEKLIIEKKKEGIL

SEQ ID NO: 193 - protein, 1029 aa, Alicycliphilus denitrificans
MRSLRYRLALDLGSTSLGWALFRLDACNRPTAVIKAGVRIFSDGRNPKDGSSLAVTRRAARAMRRRRDRLLKRKTRMQAKLVEHGFFPADAGKRKALEQLNPYALRAKGLQEALLPGEFARALFHINQRRGFKSNRKTDKKDNDSGVLKKAIGQLRQQMAEQGSRTVGEYLWTRLQQGQGVRARYREKPYTTEEGKKRIDKSYDLYIDRAMIEQEFDALWAAQAAFNPTLFHEAARADLKDTLLHQRPLRPVKPGRCTLLPEEERAPLALPSTQRFRIHQEVNHLRLLDENLREVALTLAQRDAVVTALETKAKLSFEQIRKLLKLSGSVQFNLEDAKRTELKGNATSAALARKELFGAAWSGFDEALQDEIVWQLVTEEGEGALIAWLQTHTGVDEARAQAIVDVSLPEGYGNLSRKALARIVPALRAAVITYDKAVQAAGFDHHSQLGFEYDASEVEDLVHPETGEIRSVFKQLPYYGKALQRHVAFGSGKPEDPDEKRYGKIANPTVHIGLNQVRMVVNALIRRYGRPTEVVIELARDLKQSREQKVEAQRRQADNQRRNARIRRSIAEVLGIGEERVRGSDIQKWICWEELSFDAADRRCPYSGVQISAAMLLSDEVEVEHILPFSKTLDDSLNNRTVAMRQANRIKRNRTPWDARAEFEAQGWSYEDILQRAERMPLRKRYRFAPDGYERWLGDDKDFLARALNDTRYLSRVAAEYLRLVCPGTRVIPGQLTALLRGKFGLNDVLGLDGEKNRNDHRHHAVDACVIGVTDQGLMQRFATASAQARGDGLTRLVDGMPMPWPTYRDHVERAVRHIWVSHRPDHGFEGAMMEETSYGIRKDGSIKQRRKADGSAGREISNLIRIHEATQPLRHGVSADGQPLAYKGYVGGSNYCIEITVNDKGKWEGEVISTFRAYGVVRAGGMGRLRNPHEGQNGRKLIMRLVIGDSVRLEVDGAERTMRIVKISGSNGQIFMAPIHEANVDARNTDKQDAFTYTSKYAGSLQKAKTRRVTISPIGEVRDPGFKG

SEQ ID NO: 194 - protein, 1422 aa, Sutterella wadsworthensis
MTQSERRFSCSIGIDMGAKYTGVFYALFDREELPTNLNSKAMTLVMPETGPRYVQAQRTAVRHRLRGQKRYTLARKLAFLVVDDMIKKQEKRLTDEEWKRGREALSGLLKRRGYSRPNADGEDLTPLENVRADVFAAHPAFSTYFSEVRSLAEQWEEFTANISNVEKFLGDPNIPADKEFIEFAVAEGLIDKTEKKAYQSALSTLRANANVLTGLRQMGHKPRSEYFKAIEADLKKDSRLAKINEAFGGAERLARLLGNLSNLQLRAERWYFNAPDIMKDRGWEPDRFKKTLVRAFKFFHPAKDQNKQHLELIKQIENSEDIIETLCTLDPNRTIPPYEDQNNRRPPLDQTLLLSPEKLTRQYGEIWKTWSARLTSAEPTLAPAAEILERSTDRKSRVAVNGHEPLPTLAYQLSYALQRAFDRSKALDPYALRALAAGSKSNKLTSARTALENCIGGQNVKTFLDCARRYYREADDAKVGLWFDNADGLLERSDLHPPMKKKILPLLVANILQTDETTGQKFLDEIWRKQIKGRETVASRCARIETVRKSFGGGFNIAYNTAQYREVNKLPRNAQDKELLTIRDRVAETADFIAANLGLSDEQKRKFANPFSLAQFYTLIETEVSGFSATTLAVHLENAWRMTIKDAVINGETVRAAQCSRLPAETARPFDGLVRRLVDRQAWEIAKRVSTDIQSKVDFSNGIVDVSIFVEENKFEFSASVADLKKNKRVKDKMLSEAEKLETRWLIKNERIKKASRGTCPYTGDRLAEGGEIDHILPRSLIKDARGIVFNAEPNLIYASSRGNQLKKNQRYSLSDLKANYRNEIFKTSNIAAITAEIEDVVTKLQQTHRLKFFDLLNEHEQDCVRHALFLDDGSEARDAVLELLATQRRTRVNGTQIWMIKNLANKIREELQNWCKTTNNRLHFQAAATNVSDAKNLRLKLAQNQPDFEKPDIQPIASHSIDALCSFAVGSADAERDQNGFDYLDGKTVLGLYPQSCEVIHLQAKPQEEKSHFDSVAIFKEGIYAEQFLPIFTLNEKIWIGYETLNAKGERCGAIEVSGKQPKELLEMLAPFFNKPVGDLSAHATYRILKKPAYEFLAKAALQPLSAEEKRLAALLDALRYCTSRKSLMSLFMAANGKSLKKREDVLKPKLFQLKVELKGEKSFKLNGSLTLPVKQDWLRICDSPELADAFGKPCSADELTSKLARIWKRPVMRDLAHAPVRREFSLPAIDNPSGGFRIRRTNLFGNELYQVHAINAKKYRGFASAGSNVDWSKGILFNELQHENLTECGGRFITSADVTPMSEWRKVVAEDNLSIWIAPGTEGRRYVRVETTFIQASHWFEQSVENWAITSPLSLPASFKVDKPAEFQKAVGTELSELLGQPRSEIFIENVGNAKHIRFWYIVVSSNKKMNESYNNVSKS

SEQ ID NO: 195 - protein, 1132 aa, Nitratifractor salsuginis
MKKILGVDLGITSFGYAILQETGKDLYRCLDNSVVMRNNPYDEKSGESSQSIRSTQKSMRRLIEKRKKRIRCVAQTMERYGILDYSETMKINDPKNNPIKNRWQLRAVDAWKRPLSPQELFAIFAHMAKHRGYKSIATEDLIYELELELGLNDPEKESEKKADERRQVYNALRHLEELRKKYGGETIAQTIHRAVEAGDLRSYRNHDDYEKMIRREDIEEEIEKVLLRQAELGALGLPEEQVSELIDELKACITDQEMPTIDESLFGKCTFYKDELAAPAYSYLYDLYRLYKKLADLNIDGYEVTQEDREKVIEWVEKKIAQGKNLKKITHKDLRKILGLAPEQKIFGVEDERIVKGKKEPRTFVPFFFLADIAKFKELFASIQKHPDALQIFRELAEILQRSKTPQEALDRLRALMAGKGIDTDDRELLELFKNKRSGTRELSHRYILEALPLFLEGYDEKEVQRILGFDDREDYSRYPKSLRHLHLREGNLFEKEENPINNHAVKSLASWALGLIADLSWRYGPFDEIILETTRDALPEKIRKEIDKAMREREKALDKIIGKYKKEFPSIDKRLARKIQLWERQKGLDLYSGKVINLSQLLDGSADIEHIVPQSLGGLSTDYNTIVTLKSVNAAKGNRLPGDWLAGNPDYRERIGMLSEKGLIDWKKRKNLLAQSLDEIYTENTHSKGIRATSYLEALVAQVLKRYYPFPDPELRKNGIGVRMIPGKVTSKTRSLLGIKSKSRETNFHHAEDALILSTLTRGWQNRLHRMLRDNYGKSEAELKELWKKYMPHIEGLTLADYIDEAFRRFMSKGEESLFYRDMFDTIRSISYWVDKKPLSASSHKETVYSSRHEVPTLRKNILEAFDSLNVIKDRHKLTTEEFMKRYDKEIRQKLWLHRIGNTNDESYRAVEERATQIAQILTRYQLMDAQNDKEIDEKFQQALKELITSPIEVTGKLLRKMRFVYDKLNAMQIDRGLVETDKNMLGIHISKGPNEKLIFRRMDVNNAHELQKERSGILCYLNEMLFIFNKKGLIHYGCLRSYLEKGQGSKYIALFNPRFPANPKAQPSKFTSDSKIKQVGIGSATGIIKAHLDLDGHVRSYEVFGTLPEGSIEWFKEESGYGRVEDDPHH

SEQ ID NO: 196 - protein, 1327 aa, Solobacterium moorei
MEGQMKNNGNNLQQGNYYLGLDVGTSSVGWAVTDTDYNVLKFRGKSMWGARLFDEASTAEERRTHRGNRRRLARRKYRLLLLEQLFEKEIRKIDDNFFVRLHESNLWADDKSKPSKFLLFNDTNFTDKDYLKKYPTIYHLRSDLIHNSTEHDIRLVFLALHHLIKYRGHFIYDNSANGDVKTLDEAVSDFEEYLNENDIEFNIENKKEFINVLSDKHLTKKEKKISLKKLYGDITDSENINISVLIEMLSGSSISLSNLFKDIEFDGKQNLSLDSDIEETLNDVVDILGDNIDLLIHAKEVYDIAVLTSSLGKHKYLCDAKVELFEKNKKDLMILKKYIKKNHPEDYKKIFSSPTEKKNYAAYSQTNSKNVCSQEEFCLFIKPYIRDMVKSENEDEVRIAKEVEDKSFLTKLKGTNNSVVPYQIHERELNQILKNIVAYLPFMNDEQEDISVVDKIKLIFKFKIPYYVGPLNTKSTRSWVYRSDEKIYPWNFSNVIDLDKTAHEFMNRLIGRCTYTNDPVLPMDSLLYSKYNVLNEINPIKVNGKAIPVEVKQAIYTDLFENSKKKVTRKSIYIYLLKNGYIEKEDIVSGIDIEIKSKLKSHHDFTQIVQENKCTPEEIERIIKGILVYSDDKSMLRRWLKNNIKGLSENDVKYLAKLNYKEWGRLSKTLLTDIYTINPEDGEACSILDIMWNTNATLMEILSNEKYQFKQNIENYKAENYDEKQNLHEELDDMYISPAARRSIWQALRIVDEIVDIKKSAPKKIFIEMAREKKSAMKKKRTESRKDTLLELYKSCKSQADGFYDEELFEKLSNESNSRLRRDQLYLYYTQMGRSMYTGKRIDFDKLINDKNTYDIDHIYPRSKIKDDSITNRVLVEKDINGEKTDIYPISEDIRQKMQPFWKILKEKGLINEEKYKRLTRNYELTDEELSSFVARQLVETQQSTKALATLLKKEYPSAKIVYSKAGNVSEFRNRKDKELPKFREINDLHHAKDAYLNIVVGNVYDTKFTEKFFNNIRNENYSLKRVFDFSVPGAWDAKGSTFNTIKKYMAKNNPIIAFAPYEVKGELFDQQIVPKGKGQFPIKQGKDIEKYGGYNKLSSAFLFAVEYKGKKARERSLETVYIKDVELYLQDPIKYCESVLGLKEPQIIKPKILMGSLFSINNKKLVVTGRSGKQYVCHHIYQLSINDEDSQYLKNIAKYLQEEPDGNIERQNILNITSVNNIKLFDVLCTKFNSNTYEIILNSLKNDVNEGREKFSELDILEQCNILLQLLKAFKCNRESSNLEKLNNKKQAGVIVIPHLFTKCSVFKVIHQSITGLFEKEMDLLK

SEQ ID NO: 197 - protein, 738 aa, Treponema phagedenis
MLQELFAKEIAKIDEGFFRRLDESAFYLEDKSLKQKYSLFNDDNFTDKDYYKKFPTIHHLIKALINDETHVDIRLLYLACHTIIKNRGHFLFEGKEFNTESRFDDAINELFSYLRQDMEIDFAFEDKIADIKEILENKKIGMRDKQNALNKKLSIAPKDKQKKEIIKLIVGASFNLKTLFNDEKYSSEKESYSFAKSNYEEKEAVLESLLGDGFGLILRAKAVYDSSVLSEILGNETYLSFAKVKIYDKHKEDLAKLKKVIKTYHADEFKKVFAEANIQGNYCSYVGSCKKNGKKVPIEKRADKDAFYDFLKKILKDEKAKNSDADYAFILNEIELKTFLPKQVSKKNANIPYQLRRMELEKIVNNAEKYFSFLSEKDEYGTVKEKIIQLLTFKRPYYIGIIQDTHKEKFPDRCWVVKKENAKNEKITPWNFYDHIDEDKTAEAFITSRTNKCTYLIGEDVLPRNSLLYMEYTVLNELNNLKVSVDGVNIFDVKLKKKIYEQVFKQRKEVSKKTIADFLKKEGICKKENDVVITGIDEKCTTSLKLYIDIKKIIGKRIEEEPTKNALEDIILWASIYDEGEGRKILEAKIQSVYPDVFTQDELNKILKLKISGWGRFSRKFLESIVASFPGFTDTINIITAMRETNFNLMELLGDAYGFSKGIEKFNSKFNDDKKVFSYDKLVKDLYLSPSVKRMLWRALVIVKEVKSIMGKDPKKYLLKWQEEKKLKREGLPPAMQV

SEQ ID NO: 198 - protein, 1377 aa, Streptococcus equinus
MEKTYSIGLDIGTNSVGWAVITDDYKVPAKKMKVLGNTDKKYIKKNLLGALLFDSGETAEATRLKRAARRRYTRRKNRLRYLQEIFAKEMAKVDESFFQRLEESFLTDDDKTFDSHPIFGNKAEEDTYHQEFPTIYHLRKHLADSPEKVDLRLVYLALAHMIKFRGHFLIEGQLNAENTDVQKIFADFVGVYDRTFDDSHLSEITVDAASILTEKISKSRRLENLIKQYPTEKKNTLFGNLVALALGLQPNFKTNFKLSEDAKLQFSKDTYDEDLEELLGKIGDDYADLFTAAKNLYDAILLSGILTVDDNSTKAPLSASMIKRYEEHHEDLEKLKTFIKVNNFDKYHEIFKDKSKNGYAGYIENGVKQDIFYKHLKSIISEKNGGQYFLDKIEREDFLRKQRTFDNGSIPYQIHLQEMRTILRRQGEYYPFLKENQAKIEKILTFRIPYYVGPLARKNSRFAWAKYHSDEPITPWNFDEVVDKEKSAEKFITRMTLNDLYLPEEKVLPKHSYVYETFAVYNELTKIKYVNEQGKSFFFDANMKQEIFDHVFKENRKVTKAKLLSYLNNEFEEFRINDLIGLDKDSKSFNASLGTYHDLKKILDKSFLDDKTNEQIIEDIVLTLTLFEDRDMIHERLQKYSDIFTSQQLKKLERRHYTGWGRLSYKLINGIRNKENNKTILDFLIDDGDANRNFMQLINDDSLSFKTTIQEAQVVGDVDDIEAVVHDLPGSPAIKKGILQSVKIVDELVKVMGHNPQNIVIEMARENQITGYGRNRSNQRLKRLQDSLKEFGSDILSKKKPSYVDSKVENSHLQNDRLFLYYIQNGKDMYTGEELDIDHLSDYDIDHIIPQAFIKDNSIDNRVLTSSAKNRGKSDDVPSIEIVRNRKSYWYKLYKSGLISKRKFDNLTKAERGGLTETDKAGFIKRQLVETRQITKHVAQILDARFNTKCDENDKVIRDVKVITLKSSLVSQFRKEFKFYKVREINDYHHAHDAYLNAVVGTALLKKYPKLAPEFVYGEYKKYDVRKLVAKSSDNHSELGKATAKYFFYSNLMNFFKTEVKYADGRVFERPDIETNADGEVVWNKQRDFNIVRKVLSYPQVNIVKKVEVQTGGFSKESILPKGDSDKLIPRKTKKLQWETQKYGGFDSPTVAYSVLVVADVEKGKTRKLKTVKELVGISIMERSSFEENPVSFLEKKGYHNVQEDKLIKLPKYSLFEFEGGRRRLLASATELQKGNEVVLPQYMVNLLYHSQHVNNSHKPEHLNYVKQHKDEFKDIFNLIISIARINILKPKVVDNLINEFTEYGQEDISSLSESFINLLKFISFGAPGAFKFLKLDVKQSNLRYKSTTEALSATLIHQSVTGLYETRIDLSKLGEE

SEQ ID NO: 199 - protein, 1128 aa, Streptococcus vestibularis
MSDLVLGLDIGIGSVGVGILNKVTGEIIHKNSRIFPAAQAENNVERRTNRQGRRLTRRKKHRRVRLNHLFEESGLITDFTKVSINLNPYQLRVKGLIDELSNEELFIALKNMVKHRGISYLDDASDDGNSSVGDYAQIVKENSKQLETKTPGQIQLERYQKYGQLRGDFTVEEDGKKHRLINVFPTSAYRSEALRILQTQKEFNPQITDEFINRYLEILTGKRKYYHGPGNEKSRTDYGRYTTKKDSENEYITLDNIFGILIGKCTFYPEEYRAAKASYTAQEFNLLNDLNNLTVPTETKKLSEEQKNQIINYVKNEKAMGPAKLFKYIAKLLSCDVADIKGYRIDKSDKAEIHTFEAYRKMKTLETIDFEKMSRDQLDKLAYVLTLNTEREGIQEALDHEFADGNFSQEQIDELVQFRKANSSIFGKGWHNFSVKLMMELIPELYATSEEQMTILTRLGKQKTTSSSNKTKYIDEKLLTEEIYNPVVAKSVRQAIKIVNAAIKEYGDFDNIVIEMARETNEDDEKKAIQKIQKANKDEKDAAMLKAANQYNGRAELPHSVFHGHKQLATKIRLWHQQGERCLYTGKTISIHDLINNPNQFEIDHILPLSITFDDSLANKVLVYATANQEKGQRTPYQALDSMDDAWSFRELKAFVRESKSLSNKKKEYLLTEEDISRFDVRKKFIERNLVDTRYASRVVLNALQEHFRAHKTDTKVSVVRGQFTSQLRRHWGIEKTRDTYHHHAVDALIIAASSQLNLWKKQKNTLVNYSENQLLDIETGELISDDEYKESVFKAPYQHFVDTLKSKEFEDSILFSYQVDSKFNRKISDATIYATRQAKVGKDKKDETYVLGKIKDIYSQTGYDAFIKIYQKDKSKFLMYRHDPQTFEKVIEPILENYPNKEMNEKGKEVPCNPFLKYKEEHGDYIRKYSKKGNGPEIKSLKYYDSKLGNHIDITPKDSNNKVVLQSVSPWRADVYFNKTTGKYEILGLKYADLQFEKGTGTYKISQEKYNVIKKKEGVDSDSEFKFTLYKNDLLLIKDTETKEQQLFRFLSRTKPNVKHYVELKPYDKQKFEGNESLINVLGAVAKGGQCQKGINKPNISIYKVRTDVLGNQHIIKNEGDKPKLDF

SEQ ID NO: 200 - protein, 1080 aa, Methylocystis sp.
MRVLGLDGGIASIGWALIEIFEDHEPSDGRIIDTGAWMFDAPEEKSQTGTKLKSELRRIFRGQRRVIRRRRQRMNEVRRILHRHGLLSSDNRDALKQPGLDPWKIRAEGIDRLLSPIEFAVALGHIARHRGFKSNSKGAKTSDLDAESSRMKKAVGETREKLARFGSPAKLLVEDEGFVLRQTKLKSGALETVRRFRNRDGDYSRSLLRDDLAAEVRALFRAQARLQSTFAKVELEAEFTQAAFFQRPLQDSERLVGPCPFEPAEKRSPKRGYSFELFRFLSRLNHLTLREGSEERTLTVEELRTAAADFGGVAKFTFSTLRKRLALPDIAIFVGIKADDEKKLDVVARSGEAATGTARLRRVVIDALGELAWGALISAPERLDKITEIITFRSDLDRIRAGLIEAGFDTPLIEAIVRAAADGKLDAFTGVGHISAKAARNIIPGLMRGMTYDKACAAAGYDHTASRERDAFDVGMHGKEALKKILQEERISRELVGSPSARKALIEAVKQVKAIIEKYGVPDRIHVELARDVGKSIEERRDIHFGIEKRSRQKDKLRELFGKEVGHLPQDGERGKEELLRFELWNEQMGRCLYTDEYINPKQLVASDNSVQVDHILPWSRFGDDSYLNKTLCTAKANQDKKGRTPYEWFRADKPEAEWDAFVARVESIQFMKGLKKRNYKLKNAEEAAEKFRSRNLNDTRWTCRLLAEALKQLYPKGEKDKDGKERRRVFTRPGALTNRLRRAWSLQRRKKSEKGERIADDRHHALDAIIVAATTESLLIRATREVQDIERKGLHYDLTKNITQPWPGFADEALDAVEKVFVARAERRRARGKAHDATIRHIAVRDDEAKVYERKKVGDIKLGDLIRVKDAERNAPLIENLRKWIEAGSPRDNPPLSPKGDPVSKVRLVTKNKVNITLDTGNPERLATVDRGEMARVDVFRKANRKGKYEYYLVPIYPHEIATMETPPMRAVQGGGDDDKWPEIDSTFEFLWSINQLSLLELTKPDGEVIRSYFRSLDRNTGALTVSGIANSTATRKGIGTRTLIDFKKLHVDRLGQIFEVERELRTWRGETWRGKDCI

SEQ ID NO: 201 - protein, 1087 aa, Phascolarctobacterium succinatutens
MLRMKYAIGLDIGIASVGYAVLALDHEENPWGIIRLGSRIFDVAENPKDGASLALPRREARSVRRRLRRHHHRLERIKNLLINTEFITKDELLHLYDGNLSDVYELRVKALDYSVTNAELTRILLHLAQRRGFKSNRKSDANDKEAGQLLEAVSANAKRMQENHYRTVGEMFYKDDLFSKYKRNKGGTYLTTVHRDMIAAEARTILEKQFALGNNICTQDFIDKYLSILLSQRQFDEGPGEPSPYAGNQIANMIGKCTFEPNEYRAAKASYSFERFNLLQKVNHLRLLLEGKSIALDNEQRKKIIALAHDKADLRYSHIRKALGLDEKVLFNTITYNDDVSVIEKKTKFNFLQAYHQIKKVLAEDMQKLTTEQLDNIGQILSTYKSDNKRTEELSALGLEKKIIDALLGINGLSKFAHLSLKALRKINPYLEEGKIYNEACTAAGYDFKAHANTQKTELLPAYKEEMDDITSPVARRAIAQSIKVINAIIREQKGSPLYINIELAREMAKGFDERTQIDKANKENQAKNERIMERIRTEFHKANPTGMDLIKLKLWEEQDGRSPYSQKAISINRLFEPGYVDIDHIVPYSISFDDSFKNKVLVFSDENRDKGNRLPIAYLQSKFGAKAAENFMIWVQSNIKDYKKRQKLLKREITEEDINKFKERNLQDTKTISRFLYNYINDYLLFAPSDTGKKKRVTAVNGTITAYLRKRWGINKIRANGDKHHAVDAVVIACTTDKMIKDLSSFSRYHELEYTHTDTESFLVNSLTGEILKRFPYPWEDFRPELMARLSDNPADALRKLNLIFYHGIDLSTIKPIFVSRMPRHKVTGAAHKATIKSARCLDNGIVICKTSLQNLKLDKEGEIANYYAPESDTILYNALKERLRSYDNKPAKAFAEPFYKPKADGTPGPLVKKVKVYEKSTLNVAVQQNTAVADNDSMVRVDVFHVKGNGYYLVPIYIADTLKKELPNKAIVAYKPYADWPVMDDSNFIFSLYPNDLIKFEHKNSVKFAKVNKESTLNDFYSTKSEIVYFKGCNINTGAITIINHENTYVVSSLGVKTLPSLEKYQADVLGNYTKVKKEVRKPFR

SEQ ID NO: 202 - protein, 1375 aa, Lactobacillus ruminis
MRKNQEPYNIGLDIGTSSIGWSIMNDNFDLMRVKGKKGIGVRLYNEGQSAAERRMHRTARRRYGRRKWRLRLLEDFFDEHMAEVDDTFFARLKDSNISPKDDKKYRKSLLFPKSKGVTYQDDGEFYKKYPTMYHLRYALMTEHRKFDLREIYLAFHHMVKYRGNFLYDTSVDSFEAKNLDIKGKFDEINDLLSSYTDFYVDNSNAALVESILLEKNTTRKDKSKKIAKLLHVEDKEKGKNKKAKDLATQISNAVLGLKCNFHLIFELQQKYSFDLCSEKTEENIAKLSEVLDENQKMLLMILKEVQDQVMLNAFVPSGMSLSEAMMQKYDDYGEQLKIYHELEHSVSDDSAAKLRGAYRDYNDNIIKRIDGDNKKDTFYKRVKNILTKISKEYVDQDVLESCGKLKKLIDENKLFIRQRTAANGVLPHQLHQIEMRKIIDNQKEYYPWLAEPNPNEKRRVYSKYKVEELIAFRIPYYVGPLVDPNNADKNKEARFSWMVRKKDGEITPWNFYDKVDWAESANNFIERMKSKDTYLLGEDVVPKESMLYQKYEVLNELNNLRINDSGLSDSFEDVKLKQAIYNDLFKKQKIVKITDLQNYLVQNHKYLVKPKISGLADENRFLSSLSTYSDLKTIFGDKVDDRTYFNDFEKMVEYSTVFEDGHDYNQKLDEYTWLTKEEKYKIGKKRYRGWGKLSKKLLTGLRDKNNHTIMDNLWETNRNFMQIQTADEFSKQIAEENERHLKGSVSDAINDMYTSPANKKAIRQVLRVVDDIQKAMGYAPSSISLEFAREDGPSVRTVSRANRMKSIYEKYASEVSEEVMKDLDGVIKDKKGLNDRLYLYFEQQGKDMYSGHPLDFDKVISGQEYDIDHILPQAVIKDDSLDNRVLTTKALNNDVKSKGVPCRMFNGMHSFWKNLYDKGFISRRKFNNLTTNPENIDKYKMKGFVNRQLVETRQIIKLVANVLNDKYQNDDVDIIEVRAELTHDVRKHFKFYKNRNVNDYHHAFDAYLTSFIGHYLFKKYPNLRPLFDYNDFMKVSDNVFKQLRGNNFLGEFLNKTGDIISTDGNFVLNKEEMINKLNKAYAFKKILVTKEVGQRTGAMFNETRYPAPNSRKAALKYRRMPKPDSLISVKDYKNTDIYGGYSGKNDAYMVIVDMGKQYMVVGVPVRYTEKLDKLRIKHSELYRDELRKVLSRDKTLLDSKGNVKRFDIVLDRVLYGQLIEDGNELFTLGSSKYKRNFRQLFLDKQCIEILDSSATPQPTDEELIWVYDQILDKVDKYFELYDINRQRETLRKGRAAFCSLPNISMKKDDVTKKKILNEILVALHANESESNCEKIGKKVFGRLQVPGGIKLSKEAKLIYQSPTGLFERVVYLKDL

SEQ ID NO: 203 - protein, 1391 aa, Prevotella oralis
MKKILGLDLGTTSIGWALVNEKENNEELSSIIRLGVRVNPLTVDEKSNFEKGKDITTNADRTKCRSARRNLQRFKLRREALADCLKRHGLMTDETPLCETNNSIIFKTYSNRAKAVCEKIALDDFVRVLFMINKKRGYKSSRKLNTDDEGTLVDGMDVAKLLYNEQITPGEYLLRLFKKGKKTRPDFYLSDLKAELERIWDFQRTFYPEILCNALKEDLKGKSRTQSSAIFYAKYKVSTAKIAGKDKRLQELTWRTDALRKQLTIDEVAYVICSINGEVNGSSQRLSMISDRSKLLYFNHQTIGQYLMQRLEENPNAGLKNIIFYRQDYEDEFNDIWNSQATYHKELTPELKKEVKDIIFYQRGLKSCKWLINYCELEHEEIEVKTPEGKLRKITIGSKTCPKSSPLFQEFKIWQVLNNLQVSPLNSRRKAKRKKDEEPSLFSDEDMNTACRYLNEEEKLTLFKELSIKKELKKKDALKLLFENYKELDLNYKVISGNVTMANLYRAFQDIISLTGNGEFDFQAMPAEEAEKTVEEIFGGLGYKTAFLHFDASLHDKEFERQPAYRLWHLLYSYAGDQSKTGIEALVKRIQELCGFEPEYARILANISFIPDYGNLSSKAMRKILPYMQDGYEYSEACSKAGYRHSASSLTKEEINKKNYKTHLDEIKRNSLRNPIVEKILNQMVNVVNSVIDTYSNIDEIRIEMARELKKSKPEREDMSFAISKATKETERIKGILEQEFKIQHVTRNDIIRYRLYEELKPNGYKTLYSNTYIPREDLFSKKFDIEHIIPKARLFDDSYSNKTLELRDINIEKGNQTAYDFVLSKYGEEGLYKYEQRVEEFKKNNEQAGTKCRKLLMREADIPSDFLNRDLNDSQYIAKKAHELLREIVPTVTATTGSITNRLREDWKLVNVMKELNWEKYDKLGLTEEYKDKDGNTVRHIKDWTKRNDHRHHAMDALTIAFTKPSFIQYLNNLNARSNRGGSIYGIEQKELERENNKLVFIPPIDPKIFRKQAKEHLSNILISIKAKNKVVTKNVNKTKSKSGTNRKVQLTPRGQLHLETVYGKIRTYKTEEIKVGTKLTEELIAKVADKKIREALMQRLSEYGGNIKKAFQNISKHPIWLNGSHTKHVPEKVKIVFFEDVFTIRKAITPDIKIDKVIDSKIRRILQERLNEFGGEASKAFSNLDENPIWFNRDKGIAIKSVKIRGIAKGTAIRVKKDIHGKTIIGNNGYPVANDYVNTGNNHHVAIFRDKDGNLQEHIVSFYEATARAIQNLPIVDRNYNSEKDWKFLFSMKQNEYFVFPNPNTGFNPSEISLKDEKNYALISPNLFRVQKLSHYYYVFRHHLETNVDTNLQLKDITWKRITAVNNLTGAVKVRIDHLGRIVDVGEYK

SEQ ID NO: 204 - protein, 1167 aa, Streptococcus sanguinis
MLFGLKTKFKDCFELEEEPDLNFSKENYDDNLEKLLGELGEDFSDVFDKLKILRDTILLSGMLTYTGATHARFSATMVERYEEHRKDLQRFKSFIKQNLSEQDYLDIFGRKTQNGFDVDKETKGYVGYITNKMVLTNPQKQKTIQQNFYDYISGKITGIEGSEYFLNKISDRTFLRKLRTSDNGAIPNQIHAYELEKIIERQGKDYPFLLENKDKLLSILTFKIPYYVGPLAKGNNSRFAWIKRANSSDILDDNDEDTRNGKIRPWNYHKLINMDETRDAFITNLIGNDTILLNEKVLPKRSLIYEEVMLQNELTRVKYKDKYGKAHFFDSEHRQNIINGLFKINSKRVNAERLIKYLSDNHKDLNAIEIVSGVEKGKSFNSTLKTYNDFKTIFSEEFLDSEIYQKELEEIIKVITVFDDKKSIKNYLTKYFGHLEFLDEEKINQLSKLRYTGWGRYSAKLLLDIRDEDTGFNLLQFLRNDEENRNLTNLISDNTLSFDPKIKAIQSKSTVEDDVFDEIKKLAGSPAIKRGILNSIKIVDELVQIIGYPPQNIVIEMARENMTTEEGQKKTKTRKSKLESALKNIENSVLENGKVLHSDEQLQSEKLYLYYLQNGKDIYSLDETGSPAPIYLDQLDQYEVDHIIPYSFLPIDSIDNKVLTHRKNNQRKLDNIPDKETVAHMKPFWEALYNAKLISQTKYQRLTTSERTPDGVLTESMKAGFIERQLVETRQIIKHVARILDNRFSDTKIITLKSQLVTNFRNTFHIAKIRELNDYHHAHDAYLAVVVGQTLLKAYPKLAPELIYGHHVHFNRHEENKATLRKHLYSNIMRFFNNPDSKVSKDIWDCNRDLPIIKHVIYNSQINFVKRTMIKKGAFYNQNPVGKFNKQLAANNRYPLKTKALCLDTSIYGGYGPMNSTLSIIIIAERFNEKKGKIETVKEFHDIFIIDYEKFNNNPFQFLNDTSENGFLKKNNINRVLGFYRIPKYSLMQKIDGTRMLFESKLNLHKATQFKLTKTQNELFFHMKRLLTNSNLMDLKSESAIKESQNFILKHKEEFDNISNQLSAFSQKMLGNTTSLKNLIKGYNERKIKEIDIREETIKYFYDNFIKMFSFVKSGAPKDINDFFDNKYTVARMRPKPDKRLLNATLIHQSITGLYETRIDLSKLGED

SEQ ID NO: 205 - protein, 1334 aa, Staphylococcus pseudintermedius
MGRKPYILSLDIGTGSVGYACMDKGFNVLKYHDKDALGVYLFDGALTAQERRQFRTSRRRKNRRIKRLGLLQELLAPLVQNPNFYQFQRQFAWKNDNMDFKNKSLSEVLSFLGYESKKYPTIYHLQEALLLKDEKFDPELIYMALYHLVKYRGHFLFDHLKIENLTNNDNMHDFVELIETYENLNNIKLNLDYEKTKVIYEILKDNEMTKNDRAKRVKNMEKKLEQFSIMLLGLKFNEGKLFNHADNAEELKGANQSHTFADNYEENLTPFLTVEQSEFIERANKIYLSLTLQDILKGKKSMAMSKVAAYDKFRNELKQVKDIVYKADSTRTQFKKIFVSSKKSLKQYDATPNDQTFSSLCLFDQYLIRPKKQYSLLIKELKKIIPQDSELYFEAENDTLLKVLNTTDNASIPMQINLYEAETILRNQQKYHAEITDEMIEKVLSLIQFRIPYYVGPLVNDHTASKFGWMERKSNESIKPWNFDEVVDRSKSATQFIRRMTNKCSYLINEDVLPKNSLLYQEMEVLNELNATQIRLQTDPKNRKYRMMPQIKLFAVEHIFKKYKTVSHSKFLEIMLNSNHRENFMNHGEKLSIFGTQDDKKFASKLSSYQDMTKIFGDIEGKRAQIEEIIQWITIFEDKKILVQKLKECYPELTSKQINQLKKLNYSGWGRLSEKLLTHAYQGHSIIELLRHSDENFMEILTNDVYGFQNFIKEENQVQSNKIQHQDIANLTTSPALKKGIWSTIKLVRELTSIFGEPEKIIMEFATEDQQKGKKQKSRKQLWDDNIKKNKLKSVDEYKYIIDVANKLNNEQLQQEKLWLYLSQNGKCMYSGQSIDLDALLSPNATKHYEVDHIFPRSFIKDDSIDNKVLVIKKMNQTKGDQVPLQFIQQPYERIAYWKSLNKAGLISDSKLHKLMKPEFTAMDKEGFIQRQLVETRQISVHVRDFLKEEYPNTKVIPMKAKMVSEFRKKFDIPKIRQMNDAHHAIDAYLNGVVYHGAQLAYPNVDLFDFNFKWEKVREKWKALGEFNTKQKSRELFFFKKLEKMEVSQGERLISKIKLDMNHFKINYSRKLANIPQQFYNQTAVSPKTAELKYESNKSNEVVYKGLTPYQTYVVAIKSVNKKGKEKMEYQMIDHYVFDFYKFQNGNEKELALYLAQRENKDEVLDAQIVYSLNKGDLLYINNHPCYFVSRKEVINAKQFELTVEQQLSLYNVMNNKETNVEKLLIEYDFIAEKVINEYHHYLNSKLKEKRVRTFFSESNQTHEDFIKALDELFKVVTASATRSDKIGSRKNSMTHRAFLGKGKDVKIAYTSISGLKTTKPKSLFKLAESRNEL

SEQ ID NO: 206 - protein, 1156 aa, Ruminococcus albus
MGNYYLGLDVGIGSIGWAVINIEKKRIEDFNVRIFKSGEIQEKNRNSRASQQCRRSRGLRRLYRRKSHRKLRLKNYLSIIGLTTSEKIDYYYETADNNVIQLRNKGLSEKLTPEEIAACLIHICNNRGYKDFYEVNVEDIEDPDERNEYKEEHDSIVLISNLMNEGGYCTPAEMICNCREFDEPNSVYRKFHNSAASKNHYLITRHMLVKEVDLILENQSKYYGILDDKTIAKIKDIIFAQRDFEIGPGKNERFRRFTGYLDSIGKCQFFKDQERGSRFTVIADIYAFVNVLSQYTYTNNRGESVFDTSFANDLINSALKNGSMDKRELKAIAKSYHIDISDKNSDTSLTKCFKYIKVVKPLFEKYGYDWDKLIENYTDTDNNVLNRIGIVLSQAQTPKRRREKLKALNIGLDDGLINELTKLKLSGTANVSYKYMQGSIEAFCEGDLYGKYQAKFNKEIPDIDENAKPQKLPPFKNEDDCEFFKNPVVFRSINETRKLINAIIDKYGYPAAVNIETADELNKTFEDRAIDTKRNNDNQKENDRIVKEIIECIKCDEVHARHLIEKYKLWEAQEGKCLYSGETITKEDMLRDKDKLFEVDHIVPYSLILDNTINNKALVYAEENQKKGQRTPLMYMNEAQAADYRVRVNTMFKSKKCSKKKYQYLMLPDLNDQELLGGWRSRNLNDTRYICKYLVNYLRKNLRFDRSYESSDEDDLKIRDHYRVFPVKSRFTSMFRRWWLNEKTWGRYDKAELKKLTYLDHAADAIIIANCRPEYVVLAGEKLKLNKMYHQAGKRITPEYEQSKKACIDNLYKLFRMDRRTAEKLLSGHGRLTPIIPNLSEEVDKRLWDKNIYEQFWKDDKDKKSCEELYRENVASLYKGDPKFASSLSMPVISLKPDHKYRGTITGEEAIRVKEIDGKLIKLKRKSISEITAESINSIYTDDKILIDSLKTIFEQADYKDVGDYLKKTNQHFFTTSSGKRVNKVTVIEKVPSRWLRKEIDDNNFSLLNDSSYYCIELYKDSKGDNNLQGIAMSDIVHDRKTKKLYLKPDFNYPDDYYTHVMYIFPGDYLRIKSTSKKSGEQLKFEGYFISVKNVNENSFRFISDNKPCAKDKRVSITKKDIVIKLAVDLMGKVQGENNGKGISCGEPLSLLKEKN

SEQ ID NO: 207 - protein, 1440 aa, Weeksella virosa
MKTILGLDLGTNSIGWALVEQDFENKQGLILGMGSRIIPMDAGIIGKFAEGSSISQTAERTGYRSIRRLRERHLLRRERLHRVLNILKFLPEHYAAEIDFEKRFGQFLAETEPKLAWKKNAEGKFEFLFQRSFDEMVADFKANGQDIKIPYDWTIYYLRKKALTQKISPQELAWIILNFNQKRGYYQLRGEEEEENPNKKVEFYSLKIVDVVADEQPNKKGDTWYSLHLENGWVYRRSSKIPLYDWKDKVRDFIVTTDINEDGSEKLDKDGEVKRSFRAPKEDDWTLIKKKTEQEIEQFNQTVGSYIYEALLDNPTQKIRGKLVRTIERKFYKSELKKILEKQIELQPELFTEDLYNACARELYRRNVAHQQQLSSRDFVYLFLNDIIFYQRPLRSQKSLISNCSLEFRTIKDKDGNGQIIYLKAIPKSNPYYQEFRVWQWLYNLKIFTKEDDKDVTNQFINKVEDLEALFEFLMNQKEVNHTDILTYLIEPIVKSKYPNAKGKAFKDELKKELKKYRWNYVYDADKDESKSYPMNETRYELRKRLDKVENVPADFMTRKIEQHLWHIIYSVTDKIEFEKALKSFANKYDLHQESFVENFKRFKPFDSDYGTYSEKAIKKLLPLMRVGKYWSWDIIDDKTKTRIGKIITGEYDETIKNRVREKAIDLTEENHFQGLQLWLAQYIVYDRHSEADIAGKWNSVADLEQYLSEFKQHSLRNPIVEQVITETLRVVRDIWKQYGKGAKDYFDEIHIELGREMKNTAEERKRLSSIISENETTNLRIRAILEELMYDENMENVRPYSPMQQEALKIYEDGVLSSSVEIPEDIEKISKKSEPTKSEIQRYKLWLEQKYRSPYTGRPIPLSKLFTPAYQIEHIIPQARFFDDGFSNKVICESEVNALKDKMLGLEFIQNYYGQKVTTSFGEVTILTEDAYKAFVKEHYDKNRSKRNKLLLEEIPEKMIDRQMNDTRYISKYISKVLSNLVRGEKDDEGVNSKNIIPGNGKITGILKQDWGLNDVWNDLILPRFERMNQLTNSTDFTAWNEKHQKFLPSVPLELSKGFQKKRIDHRHHALDALIIACATRDHVNLLNNKHAKSRNERYDLQHKLRHTTPWQDKEGKVRTKFTEFKKPWETFTQDTKKELEKIVVNFKQNLRVINKATNYYEKIVDGKKVMFKQEGVNWAIRKPMHKETVSGKIDLPRVKVSKGKILTATRKSLDTSFNAKTILSITDTGIQKILLNYLKAKGNPELAFSPEGIEEMNQNISLYNDGKPHQPILKVRVFEQGSKFPLGETGNKTTKYVEAAKGTNLFFGVYEDNQGKRSYDTIPLNIVIERQKQGLNSVPETNEKGHRLLFSLSPNDLVYVPIEGEVFDETNPDVNRIYKVVSFSGSQMFCVRQDVATSIVYKLEFSSLNKMERTIDGIMIKEICIKLKVDRLGNISKA

SEQ ID NO: 208 - protein, 1179 aa, Sphaerochaeta globus
MSKKVSRRYEEQAQEICQRLGSRPYSIGLDLGVGSIGVAVAAYDPIKKQPSDLVFVSSRIFIPSTGAAERRQKRGQRNSLRHRANRLKFLWKLLAERNLMLSYSEQDVPDPARLRFEDAVVRANPYELRLKGLNEQLTLSELGYALYHIANHRGSSSVRTFLDEEKSSDDKKLEEQQAMTEQLAKEKGISTFIEVLTAFNTNGLIGYRNSESVKSKGVPVPTRDIISNEIDVLLQTQKQFYQEILSDEYCDRIVSAILFENEKIVPEAGCCPYFPDEKKLPRCHFLNEERRLWEAINNARIKMPMQEGAAKRYQSASFSDEQRHILFHIARSGTDITPKLVQKEFPALKTSIIVLQGKEKAIQKIAGFRFRRLEEKSFWKRLSEEQKDDFFSAWTNTPDDKRLSKYLMKHLLLTENEVVDALKTVSLIGDYGPIGKTATQLLMKHLEDGLTYTEALERGMETGEFQELSVWEQQSLLPYYGQILTGSTQALMGKYWHSAFKEKRDSEGFFKPNTNSDEEKYGRIANPVVHQTLNELRKLMNELITILGAKPQEITVELARELKVGAEKREDIIKQQTKQEKEAVLAYSKYCEPNNLDKRYIERFRLLEDQAFVCPYCLEHISVADIAAGRADVDHIFPRDDTADNSYGNKVVAHRQCNDIKGKRTPYAAFSNTSAWGPIMHYLDETPGMWRKRRKFETNEEEYAKYLQSKGFVSRFESDNSYIAKAAKEYLRCLFNPNNVTAVGSLKGMETSILRKAWNLQGIDDLLGSRHWSKDADTSPTMRKNRDDNRHHGLDAIVALYCSRSLVQMINTMSEQGKRAVEIEAMIPIPGYASEPNLSFEAQRELFRKKILEFMDLHAFVSMKTDNDANGALLKDTVYSILGADTQGEDLVFVVKKKIKDIGVKIGDYEEVASAIRGRITDKQPKWYPMEMKDKIEQLQSKNEAALQKYKESLVQAAAVLEESNRKLIESGKKPIQLSEKTISKKALELVGGYYYLISNNKRTKTFVVKEPSNEVKGFAFDTGSNLCLDFYHDAQGKLCGEIIRKIQAMNPSYKPAYMKQGYSLYVRLYQGDVCELRASDLTEAESNLAKTTHVRLPNAKPGRTFVIIITFTEMGSGYQIYFSNLAKSKKGQDTSFTLTTIKNYDVRKVQLSSAGLVRYVSPLLVDKIEKDEVALCGE

SEQ ID NO: 209 - protein, 1370 aa, Streptococcus gallolyticus
MTKKNYSIGLDIGTNSVGWAVITDDYKVPAKKMKVLGNTDKKYIKKNLLGALLFDSGETAEATRLKRTARRRYTRRKNRLRYLQEIFAEEMTKVDESFFYRLDESFLTTDEKDFERHPIFGNKAEEDAYHQKFPTIYHLRNYLADSSEKADLRLVYLALAHMIKYRGHFLIEGKLNAENTDVQKLFTDFVGVYDRTFDDSHLSEITVDVASTLTEKISKSRRLENLIKYYPTEKKNTLFGNLIALALGLQPNFKMNFKLSEDAKLQFSKDTYEEDLEELLGKIGDDYADLFTSAKNLYDAILLSGILTVDDNSTKAPLSASMIKRYVEHHEDLEKLKEFIKANKSELYHDIFKDKNKNGYAGYIENGVKQDEFYKYLKNTLSKIDGSDYFLDKIEREDFLRKQRTFDNGSIPHQIHLQEMHAILRRQGDYYPFLKEKQDRIEKILTFRIPYYVGPLVRKDSRFAWAEYRSDEKITPWNFDKVIDKEKSAEKFITRMTLNDLYLPEEKVLPKHSHVYETYAVYNELTKIKYVNEQGKESFFDSNMKQEIFDHVFKENRKVTKEKLLNYLNKEFPEYRIKDLIGLDKENKSFNASLGTYHDLKKILDKAFLDDKVNEEVIEDIIKTLTLFEDKDMIHERLQKYSDIFTANQLKKLERRHYTGWGRLSYKLINGIRNKENNKTILDYLIDDGSANRNFMQLINDDTLPFKQIIQKSQVVGDVDDIEAVVHDLPGSPAIKKGILQSVKIVDELVKVMGDNPDNIVIEMARENQTTNRGRSQSQQRLKKLQSSLKELGSNILNEEKPSYIEDKVENSHLQNDQLFLYYIQNGKDMYTGDELDIDHLSDYDIDHIIPQAFIKDDSIDNRVLTSSAKNRGKSDDVPSLDIVRARKAEWVRLYKSGLISKRKFDNLTKAERGGLTEADKAGFIKRQLVETRQITKHVAQILDARFNTEHDENDKVIRDVKVITLKSNLVSQFRKDFEFYKVREINDYHHAHDAYLNAVVGTALLKKYPKLASEFVYGEYKKYDIRKFITNSSDKATAKYFFYSNLMNFFKTKVKYADGTVFERPIIETNADGEIAWNKQIDFEKVRKVLSYPQVNIVKKVETQTGGFSKESILPKGDSDKLIPRKTKKVYWDTKKYGGFDSPTVAYSVFVVADVEKGKAKKLKTVKELVGISIMERSFFEENPVEFLENKGYHNIREDKLIKLPKYSLFEFEGGRRRLLASASELQKGNEMVLPGYLVELLYHAHRADNFNSTEYLNYVSEHKKEFEKVLSCVEDFANLYVDVEKNLSKIRAVADSMDNFSIEEISNSFINLLTLTALGAPADFNFLGEKIPRKRYTSTKECLTATLIHQSITGLYETRIDLSKLGEE

SEQ ID NO: 210 - protein, 1044 aa, Nitrosomonas sp.
MLHKMRYRLALDLGSTSLGWAMVRLNANQQPCAVIKAGVRIFSNGRNPKDGSSLAVTRREARSMRRRRDRLLKRKARMMRTLIEYGFFPANETQRKALENLNPYALRAKGLDEALTPSEFARALFHINQRRGFKSNRKTDKKDSDSGALKTAIKQLHSVLDPQGNDGKPRTVGELLYKRFTDLSKLPKDRTVRARYRQDKIVKDDGKTKIDKYYDLYIDRAMIEQEFDALWKKQSELNPILFTENARADLKDVLLYQRSLKPVKPGRCTFMSEEERAPLALPSTQRFRMYQEVNNLRILREGLKEESLTLQQRDDLINALEKNNRRTFTQIKKLLGVGGSVQFNFEDPKREELKGNTTSAILGKSEHFGEAWFAFNEAKQDAIVLQLIKEENEAKLVRWLQDETGIDEKRAEVIANAGLPEGYGSLCIEALARILPELRRDVVTYDKAVQAAGFEHHSKLNRNEEIPDITFKIESIDRNSGEIKQFHLHKELPYYGEYLQRHVGFGSGKPEDSIEKRYGKIANPTVHIGLNQVRVVVNALIKRYGHPSEIIVEVARDLKQSKDRRDEENKRQAENQKRNERLRKDIADILGISEERVRRDDIEKMILWEELSFDPADRRCPYSGVQVSTVMLLSDEVEVEHILPFSQTLDDSLNNKTVALRQANRIKGNRTPWEAFGTSNISGFDYSGILTRAELMPKAKRYRFAEDGYQRWLKDDAGFLARALNDTRHLSKIAREYMSLICPNTRVIPGQMTAMLRRNFGLNDVLGLNGEKNRNDHRHHAVDACVIAVTDQGLLQRFAAASASARERQLNRLVENMPLPWESYREHVRRAIDGIWVSHRPDHSHEGAMHNDTAYGLRGNGRVSFHKMVEGKREYIEDNLKVIEITDTKAIDRHGLLPTGKPRPYKGYKGDSNYCIEIVRNEKGRWEGEIISTFDAYQLVRKYGIVQLRYPVLSVSGKPLVMRLIRNDFVRLEHEGITRTLRVCKMREDGQVALADVTEANVDARTRTKEICYVFKTGGSLQKAKARRITISPIGELRDPGFKE

SEQ ID NO: 211 - protein, 1045 aa, Acidovorax avenae
MQKEKPLAYRLALDLGSTSLGWAVLRLSAPGEPSAVIRAGSRIFSDGRNPKDGSSLAVTRRAARAMRRRRDRLLKRKARMLAALERHGFFPQDEAARKALEKLNPYGLRARGLESALKPEEFGRALFHLNQRRGFQSNRKTDRKDSDSGALKQAIGTLRAQMHESGCRTVGEWFWKVRMERKPEGVKGQGVRARYRETPFTTDEGKKRIDKRYDLYVDRAMVAQEFDALWAAQATFAPALFNEAARAELRDILLHQRKLRPVQPGRCTLVPEEPRALLALPSTQRFRIYQEVNHLRVLHDELREEALTLAQRDQIVALLERQAKVTFTAMRKALGFSALFNLEDAKRDGLKGNATTAALGKKDLFGPLWAGFDTALQDEIVTQLMTEESEPRLIAWLQEHTGVDEARAQAIANAGLPEGYGSLGRTALARIVPELQRDVITYDKAVQAAGFAHHSDLGFSFEHDADEVERIGERTIASTGEIKPVFAFKQLPYYGRALQRHVAFAKENPRNDEERYGKIANPTVHIGLNQVRVVVNALMCRYGRPTEVVIELARDLKQSREQKLEAQQRQADNQKRNARIRRSIAEVLGISEERVRTLDIQKWILWEELSHDAADRRCPYSGVQISASMLLGERVEIEHILPFSMTLDDSLNNRTVALREANRIKRNRTPWDARTDFEAHGWSYDGILQRAERMPQRKRHRFAPDGYERWLGEDKDFLARALNDTRYLSRVAAEYLRLVCPGSATRVIPGQMTALLRGKFGLNDVLGLDGEKNRNDHRHHAVDACVIGVTDQRMMQRFAQANAQAREDGLTRLVEDMPLPWPTYRAHVERAVRHIWVSHKPDHGFEGAMMEETSYGILRDGTIKQRRKADGSAGREISRLIRITEPSQPQRHGVDAEGRPLPYKGYVGGSNYCLEITVNDKGKWEGQVISTFDAYRIVREGGLRQLRHSTQGQNGQALAMRLVIGDSVRLEVDEQERVMRIVKINGNNGQVFMAPVHEANVDARNSDKNEAFAYTSKIAGSFQKTKARQVTISPIGELRDPGFKG

SEQ ID NO: 212 - protein, 1218 aa, Prevotella denticola
MKASEEKLSKGLSTYMKENNLLTVGAAFAQLEDEGVRIRNNNNYRAIRSQFQHEIETIFMFQQGLSENELYERLVSEKKNIGTIFYKRPLRSQRGNVGKCTLERTKPRCAIGHPLFEKFRAWTLINNIKIRMSEEEQAEQLPMKLRFELYNDCFLAFVRAEFKFEDIRKYLEKRLGVHFSYNDKTINYKDSTSVAGCPITARFRKLLGEDWESFHVDGQKQRQAHGKNNASFHTVSYSTNDIWHFCYDAEEPEAVLSFAQDNLKWEKKKAEELVRIWSAIPQGYAMLSQKAIRNINKMLILGLKYSDAVLLAKVPEIVEITDGEILSVTEDYHRVEAQVGYEKQINNIVNALIAKYKSASEEYRFADHNYEYQLDKSDEKDIIKQIESNIGTRKWSLLDADEQTDILQKVRDKYQNFFRSHERKFVESPKLGECFEEYLMKKFPMVEGEQWKKLYHPSQIAIYRPVSAGKDRSALRLGNPDIGAIKNPTVLRVLNTLRKRVNQLLDDGLISPDETRVVVETARELNDANRKWALDNYNRIRHDENEKIKKILEEFYPKRDGISTDDIDKARYVIDQREMDYFTEEKPYNKDIKKYKLWLEQGGQCMYTGRTINLSNLFDPNSFDVEHTIPESISFDSSDMNLTLCDAHYNRFIKKNHIPADLPNYDKSVVIDGKEYSPIKPRLQRWADRVERLNRNVEYWRGQARRAQNKDRKDQCMREMHLWKMELEYWTKKLERFTITEVTDEFKNSQLVDTRVITRHAVLYLKSIFPHVDVQRGDVTAKFRKILGIQSVDEKKDRSLHSHHAIDATTLTIIPGAAKRERMLELFAKIEEVNKMLSFSGNEDRTGLKQELDGLKNQLNKEVKACRIGHNVSEIGTFINDNIIINHHVKNQALTPVRRRLRKRGHIVGGMDNPRWQTGDALRGEIHKASYYGAITQFAKDKDGKVLLKEGHPLVDPTIKFVIRRELKYKKSTADSGFASWDDLEKAIVDKELFALMKGQFPEETSFKDACEQGIYMIKKGKNGEVDTKLYRIRHIRCKTKQKNALKIKEQAYKSEKEYKRYFYAAVGDLYAMCCYTNGKTREFKIYSLYDISCHRKVGVEDIPEFITDKKGNRLMLDYKLHTGDMILLYKENPEELYDLDNVSLSKLLYKINGFENDGLRIRMVNHLVAKEAMGESVKDYAKLPDIIRCGVKTIKFLVMGENRDFVIKNGKISFNHR

SEQ ID NO: 213 - protein, 1458 aa, Fluviicola taffensis
MTKTILGLDLGTNSIGWALINQDFDNKKGEILGMGSRIIPMTQDIKDEFGKGNSISQTAERTRLRGVRRLIHRTLLRRERLHRVLNIIGFLPEHYANQIDFEKRFGKFKPESEPKISFDGNDVFLFEKSYQEMLVDFKIHQPQLVSNGKKIPHDWTIYYLRKKALSKKIEKEELAWILLNFNQKRGYYQLRGEEEEETPNKLVEFHSLKIVEVNADEPQKGKPEIWYSLVLENGWVYRRASKTPLFDWKDKIREFIVTTEINNDGTVKTDKEGTEKRSFRAPKPEDWTLQKKKTEFELSKSGNEVGAFIYESILQKPNQKIRGKLISTIERKFYKEELKTILKTQLFFHKELKDEKLYNACIEELYKNNEAHRSLLSNKGFEHLFINDILFYQRPLRSKKSQISNCPLEKRTYKKEGIEITEGIKVISKSNPIYQEFRLWQWISNLSLYCIEPTETNVTSTFLNSIEDYENLFEFLNNRKEIEQKHLLKYLLENQGFKGKLLTNELEKFRWNFVADKKYPCNETGSLLHTRLSKVKNISPDFLTKEIEHQLWHIIYSVTDKIEYEQALKTFARKNNLDVDSFFEHFKKIPPFESTYGAYSEKAIKKLLPLIRLGKYWNWEAIDSISKDRISKILSGEYDENIKNRVREKAVHLTSENNFQGLQEWLAKYIVYDRHSEGNDLGKWTSVSDLETYLKEFKQHSLRNPIVEQVITETLRVVKDIWIKHGKGTENFFDEIHVELGREMKNNSEDRKRLTNTITENENTNLRIKALLMEMMNDNDVENVRPYSPSQQEILKIYEDGALNSNIELDDEIVKISKKAEPTKSELQRYKLWLEQKYRSPYTGQVIPLNKLFTSEYEIEHVVPQSRFFDDSFSNKVICESAVNKRKDNQLGLQFIKNHSGEKVELGFGKVVQVFTEEQYLDFVKEHYSKNRSKHNKLLLEEIPEKMIERQLNDTRYISKFVSSILSNIVRSEKDDDGLNSKNILPGNGKITTELKRDWGLNDVWNDLILPRFERMNTITNSDLFTTYNDKYQKHLPTVPFEYSKGFQKKRIDHRHHAMDALVIACATRDHLNLMNNQSAKSELKRYDLQNKLRKKEPYFNQKENKQKEAFKDFIKPWGTFTEDSKNALEKIIISFKQNLRVINKATNSYESYKDEDGNLRIGKDGKPEKGLIKQKGLNWAIRKPLHKDTVSGQINLSRIKLPNGKILTATRKNLDTSFDLKTIENSITDTGIQKILKNYLLSKESPELAFSPEGLEEMNNEIEKYNNGKFHHPINKARIYELGSKFNVGQTGNRRDKFVEAAKGTNLFFAIYQDENKNRSYETIPLNEVIEHQKWRASLPKEEQEKIPLVPVNKLKGTFIFSLSPNDLVYVPSNDELERSASIDFSKLKKEQINRLYKMVSSSGSQCFFVKSEVATSVVNKMEYSSLNKMEKSIDNLMVKEICIKLKIDRLGNISKA

SEQ ID NO: 214 - protein, 1384 aa, Coriobacterium glomerans
MKLRGIEDDYSIGLDMGTSSVGWAVTDERGTLAHFKRKPTWGSRLFREAQTAAVARMPRGQRRRYVRRRWRLDLLQKLFEQQMEQADPDFFIRLRQSRLLRDDRAEEHADYRWPLFNDCKFTERDYYQRFPTIYHVRSWLMETDEQADIRLIYLALHNIVKHRGNFLREGQSLSAKSARPDEALNHLRETLRVWSSERGFECSIADNGSILAMLTHPDLSPSDRRKKIAPLFDVKSDDAAADKKLGIALAGAVIGLKTEFKNIFGDFPCEDSSIYLSNDEAVDAVRSACPDDCAELFDRLCEVYSAYVLQGLLSYAPGQTISANMVEKYRRYGEDLALLKKLVKIYAPDQYRMFFSGATYPGTGIYDAAQARGYTKYNLGPKKSEYKPSESMQYDDFRKAVEKLFAKTDARADERYRMMMDRFDKQQFLRRLKTSDNGSIYHQLHLEELKAIVENQGRFYPFLKRDADKLVSLVSFRIPYYVGPLSTRNARTDQHGENRFAWSERKPGMQDEPIFPWNWESIIDRSKSAEKFILRMTGMCTYLQQEPVLPKSSLLYEEFCVLNELNGAHWSIDGDDEHRFDAADREGIIEELFRRKRTVSYGDVAGWMERERNQIGAHVCGGQGEKGFESKLGSYIFFCKDVFKVERLEQSDYPMIERIILWNTLFEDRKILSQRLKEEYGSRLSAEQIKTICKKRFTGWGRLSEKFLTGITVQVDEDSVSIMDVLREGCPVSGKRGRAMVMMEILRDEELGFQKKVDDFNRAFFAENAQALGVNELPGSPAVRRSLNQSIRIVDEIASIAGKAPANIFIEVTRDEDPKKKGRRTKRRYNDLKDALEAFKKEDPELWRELCETAPNDMDERLSLYFMQRGKCLYSGRAIDIHQLSNAGIYEVDHIIPRTYVKDDSLENKALVYREENQRKTDMLLIDPEIRRRMSGYWRMLHEAKLIGDKKFRNLLRSRIDDKALKGFIARQLVETGQMVKLVRSLLEARYPETNIISVKASISHDLRTAAELVKCREANDFHHAHDAFLACRVGLFIQKRHPCVYENPIGLSQVVRNYVRQQADIFKRCRTIPGSSGFIVNSFMTSGFDKETGEIFKDDWDAEAEVEGIRRSLNFRQCFISRMPFEDHGVFWDATIYSPRAKKTAALPLKQGLNPSRYGSFSREQFAYFFIYKARNPRKEQTLFEFAQVPVRLSAQIRQDENALERYARELAKDQGLEFIRIERSKILKNQLIEIDGDRLCITGKEEVRNACELAFAQDEMRVIRMLVSEKPVSRECVISLFNRILLHGDQASRRLSKQLKLALLSEAFSEASDNVQRNVVLGLIAIFNGSTNMVNLSDIGGSKFAGNVRIKYKKELASPKVNVHLIDQSVTGMFERRTKIGL

SEQ ID NO: 215 - protein, 1077 aa, Neisseria bacilliformis
MQQKPQRYILGLDLGIASVGWACVWADENEHPTGLLDCGVRTFERAEVPKTGDSLALARRQARSVRRLIRRRAHRLLRLRRLLKREGVLLSADFNENGLVRGLPIDAWALRVAGLDRKLSNKEWAAVLLHLVKHRGYLSQRKNETQSKDKELGRLLAGVNGNREALQNRSDEYRTAAELAVKKFAAENNGSLRNKGGDYSHTFDRKDLQRELHLLFERQRALDNPFTSSEMEAAVDELLMKQRSALQGEAVLKMLGRCTFEPSEYKAAKNTYSAERFVWLTKLNNLRIQYNGEERALSEAERRLLLDEPYQKAKLTYKQVRTILELPESAVFKGLRYGHGEDGLKAESGTLMEMKAYHAVRKALKDAGLEGEWENRIRNPELLDAIGTAFSLYKTDEDIRANLAAFRLSENVLEALLAGLNFDKFVHLSLKALAKILPLMEQGMRYDEACKEAYGDHYGAKEQEDHRLLPPFVADDIRNPVVFRTLTQARKIVNEIVRRYGSPLRVHIETGREVGKSFSDRKEIEKRQEENRKERERAAAHFKELFPNFAGEPKAQDILKLRLYEQQHGKCLYSGKEIDLRRLPEKGYVEIDHALPFSRTWDDSFNNKVLVLGKENQDKRNRTPYEYLDGKGNSGAWRAFAERVSGCRFPYAKKQRLLTQKLDEKTEQGFLERNLNDTRYVARFLCQFIEEKMHLEGAGKKRVFASNGQITALLRGFWGLKKVREENDRHHALDAVVVACSSVSMQQKITRHFRYREELEHIDRETGEVIHGFPQPWEFFRQEVMTRVFSDDPVSELAEKLDSRPEAVHEFVTPLFVSRAPHRKVTGQGHLETIRSAKRLDEKISVVKLPLTQLKTKDIERIVGYPNREPALYDALAARLAAFKDDPAKAFSEPFYKTGKDGKCGVLVKAVRVENVQKSGLLVRKDESGKMQGVADNATMVRVDVFGKNGKNYLVPVYAWQVEKGELPNRAVVAYADEEDWDEMDDSFEFKFSLYPNDLVEVVTKKDKFFGYYSGFNRATGAINIKEHDLSKSKVKNGVYEGIGVKTAQSFQKYQVDTLGKTIRLCKPEKRMGFKKK

SEQ ID NO: 216 - protein, 1029 aa, Alicycliphilus denitrificans; identical to SEQ ID NO: 193

SEQ ID NO: 217 - protein, 1122 aa, Streptococcus suis; identical to SEQ ID NO: 87

SEQ ID NO: 218 - protein, 1428 aa, Parasutterella excrementihominis
MGKTHIIGVGLDLGGTYTGTFITSHPSDEAEHRDHSSAFTVVNSEKLSFSSKSRTAVRHRVRSYKGFDLRRRLLLLVAEYQLLQKKQTLAPEERENLRIALSGYLKRRGYARTEAETDTSVLESLDPSVFSSAPSFTNFFNDSEPLNIQWEAIANSPETTKALNKELSGQKEADFKKYIKTSFPEYSAKEILANYVEGRRAILDASKYIANLQSLGHKHRSKYLSDILQDMKRDSRITRLSEAFGSTDNLWRIIGNISNLQERAVRWYFNDAKFEQGQEQLDAVKLKNVLVRALKYLRSDDKEWSASQKQIIQSLEQSGDVLDVLAGLDPDRTIPPYEDQNNRRPPEDQTLYLNPKALSSEYGEKWKSWANKFAGAYPLLTEDLTEILKNTDRKSRIKIRSDVLPDSDYRLAYILQRAFDRSIALDECSIRRTAEDFENGVVIKNEKLEDVLSGHQLEEFLEFANRYYQETAKAKNGLWFPENALLERADLHPPMKNKILNVIVGQALGVSPAEGTDFIEEIWNSKVKGRSTVRSICNAIENERKTYGPYFSEDYKFVKTALKEGKTEKELSKKFAAVIKVLKMVSEVVPFIGKELRLSDEAQSKFDNLYSLAQLYNLIETERNGFSKVSLAAHLENAWRMTMTDGSAQCCRLPADCVRPFDGFIRKAIDRNSWEVAKRIAEEVKKSVDFTNGTVKIPVAIEANSFNFTASLTDLKYIQLKEQKLKKKLEDIQRNEENQEKRWLSKEERIRADSHGICAYTGRPLDDVGEIDHIIPRSLTLKKSESIYNSEVNLIFVSAQGNQEKKNNIYLLSNLAKNYLAAVFGTSDLSQITNEIESTVLQLKAAGRLGYFDLLSEKERACARHALFLNSDSEARRAVIDVLGSRRKASVNGTQAWFVRSIFSKVRQALAAWTQETGNELIFDAISVPAADSSEMRKRFAEYRPEFRKPKVQPVASHSIDAMCIYLAACSDPFKTKRMGSQLAIYEPINFDNLFTGSCQVIQNTPRNFSDKTNIANSPIFKETIYAERFLDIIVSRGEIFIGYPSNMPFEEKPNRISIGGKDPFSILSVLGAYLDKAPSSEKEKLTIYRVVKNKAFELFSKVAGSKFTAEEDKAAKILEALHFVTVKQDVAATVSDLIKSKKELSKDSIENLAKQKGCLKKVEYSSKEFKFKGSLIIPAAVEWGKVLWNVFKENTAEELKDENALRKALEAAWPSSFGTRNLHSKAKRVFSLPVVATQSGAVRIRRKTAFGDFVYQSQDTNNLYSSFPVKNGKLDWSSPIIHPALQNRNLTAYGYRFVDHDRSISMSEFREVYNKDDLMRIELAQGTSSRRYLRVEMPGEKFLAWFGENSISLGSSFKFSVSEVFDNKIYTENAEFTKFLPKPREDNKHNGTIFFELVGPRVIFNYIVGGAASSLKEIFSEAGKERS

SEQ ID NO: 219 - protein, 1371 aa, Lactobacillus buchneri
MKVNNYHIGLDIGTSSIGWVAIGEDGKPLRIKGKTAIGARLFQEGNPAADRRMFRTTRRRLSRRKWRLKLLEEIFDPYITPVDSTFFARLKQSNLSPKDSRKEFKGSMLFPDLTDMQYHKDYPTIYHLRHALMTQDEKFDIRMVYLAIHHIVKYRGNFLNSTPVDSFKASKVNFVDQFKKLNELYTAINPEESFQINLANSEDIGHQFLDPSIRKFDKKKQIPKIVPVSVDDKATDKINGKIASEIINAILGYKSKLDVVVQCTPVDSKSWALKFDEEDIDAKLQKILPEMDENQQSIIAILQNLYSQVTLNQIVPNGMSLSESMIEKYNDHHDHLKLYKKIIDQLADPKKKAALKKAYSQYVGDDGKVIEQADFWSSVKKNLDDSDLSKQIMDLIDAEKFMPKQRTSQNGVIPHQLHQRELDEIIEHQSKYYPWLAEINPNKHDLHLAKYKIEELVAFRVPYYVGPMITPDDQAKSAETVFSWMERKGKEAGQITPWNFDEKVDRNASANRFIKRMTTKDTYLIGEDVLPDESLLYEKFKVLNELNMVRVNGKLLKVADKQAIFQDLFENYKHISVKKLQNYIKSKTGLPSDPEISGLSDPEYFNNSLGTYNDFKKLFGNKVDEPDLQDDFEKIVEWSTVFEDKRILREKLNEITWLSDQQKDVLESSRYQGWGRLSKKLLTGIVNDQGERIIDELWNTNKNFMQIQSDNDFAKRIHEANADQMKAVDVEDVLADAYTSPQNKKAIRQVVKVVDDIQKAMGGVAPKYISIEFTRSEDRNPRRTISRQRQLENTLKDTAKSLAKSINPELLSELDNAAKSKKGLTDRLYLYFTQLGKDIYTGKPINIDEISTYDIDHILPQAFVKDDSLNNRVLVSKAINNGKSDNVPVQLFGAKMGHFWKQLAEAGLISKRKLKNLQTDPDTISKYAMHGFIRRQLVETSQVIKLVANILGDKYRNDNTKIIEITARMNHQMRDEFGFIKNREINDYHHAFDAYLTAFLGRYLYHRYIKLRPYFVYGDFKKFKEDKVTMRNFNFLHDLTDDTQEKIADAETGEVIWDRENSIQQLKDVYHYKFMLISHEVYTLRGAMFNQTVYPASDAGKRKLIPIKADRPINVYGGYSGSADAYMAIVRIHNKKGDKYRVVGVPMRARDRLDAAKKVSDADCDRALKDVLTPQLTKTKKSRKTGEITQVVEDFEIVLGKVMYRQLMIDGDKKFMLGSSTYQYNAKQLVLSDQSVKTLASKGRLDPLQESMDYNNVYTEILDKVNQYFSLYDMNKFRHKLNLGFSKFISFPNHNVFDGNTKASSGKREILEEVLNGLHANPTFGNLKDIGITTPFGQLQQPNGILLSDEAKIRYQSPTGLFERTVSLKDL

SEQ ID NO: 220 - protein, 1090 aa, Sphingomonas sp.
MDWRLGLDLGANSLGWAALRLDRAGDPIGILAMGSRIFSDGRDPKSGASLAVDRRAARAMRRRRDRFKQRQAALLKYLIRDGLFPADQADRQRLADEDPYALRARALDEELSLFEIGRALFHLNQRRGFQSNRKADRGQDDEAGKIAVGVDRLNQQMEEQGARTLGEFLHQRRRAATDANHIPSVRTRLRPETGEGAKGDGYDFYPSRALIAEEFEEIWAAQAPHYPDTLTQQVHDRLYEIIFHQRPLRAPQVGQCTLVAGETRLPKAHPLFQKRRLLEEINALMIVRPGEIAQRLTPEERDTLYLKLKDKRTVSFATLRKTLKLDSAARFNKESENRTELKGDEVAAELGAKTRLGTRWQHLSGDQQWEVVHRLMALESQADEAAFRDWISQTYDLLPEQAAAVLGARLPQGHGRFGPTATTTLIDSLLHDRTEDGRVVVYSEAVQRSGLGHHSDLRHDRDDEDVTELPYYGVALERHIMPGTAEPTDPEEMRIGRLTNPTVHIGLNQLRHVVNRLIRAYGPPKEIAIELARELKLSEDEKKKRNSENRDNRLAAEGRSKKLEEIRQRDTGANRALLKLWEELNPGNVLDRRCIYTGEQISIDMLFSDRVEVDHILPFAQTLDDSNGNKLLCLREANREKRRRSPYEAWGHTDRWPDIAERASRLPKPKRWRFEPDAMQRFATEDGFLARHLVDTQYLGRLAREYLSWLYPGRGEGSGHVWVSPGRLTEMVRRKLGLNDLLPDHNFGGGADQPKNRLDHRHHAIDALVVAIVDRGMLQAIARASGQDGSEGRERIHIPAPWDGFRDDLRVAVNGIIVSHRPDHGTVAKAGLARGRDQTAGRLHNDTAYGLTGETDAKGNSIVVRRIPLSAIKKPADIARVRDPLLRNALAEFTKGLDGKAFEARIGRFHELGPLLYRGIRRVRVVETLTVIPIRDAEGRAYKGYKGDSNYRYDVWEMPDGKWRCQVVSMFDAHQSTEQARPHPAARKILSLQRNDILAIERTEGDRELVRVVKFSEKQFAVAPPHEGGSLKTRDGNADDPFRYLYPSPNTLKGWRARQVRIDELGRVLDPGFPARKSVRRTRPRAAPVD

SEQ ID NO: 221 - protein, 1000 aa, Kingella kingae
MARAQRRLISRRANRMNKLRRLLKQENVLQANDYDEKGLIIGLPNQAWELRAQGLDRKLEPKEWAAVLINLVKHRGYLSQRKNESQTADKELGALLSGMNHNHQLLQSQSNQYRTPAELAIKQFATQDGHIRNQRGAYTHTFNRLDLQNELNQLFDAQTRLGNPHVSGSLKTAINDLLMNQKAALSGDAILEMLGRCTFEPSEYKAAKNTYSAERFVWLGKLTNLRIQDNGLESALSREQRELLLNEPYNKTKLTYQQVRKLLRLPETAFFKGLRYGKDNAESATFMEMKSYHAIRKSLENKSLKSEWEKLKTQPKLLDLIGTAFSIYKTDDEIAGCLKNQLPENVIIALQEQLNFSNFMELSLKALEKLLPLMEQGLRYDEACTQIYGNRHEKIADKTEKFLPNIPADKLRNPVVLRTLTQARKVINAIIRRYGSPARVHIETGREVGKSFSDRDKLKKQQEENQEQRRRAIDEWKQFFPNAAHEPKAVDILKLRLYQLQQGKCLYSGLPIDVRRLPEKGYVEIDHALPFSRTWDDSFNNKILVLASENQNKGNQTPYEYLRGADNSESWRLFVENVQNCQFSPNKKQKIMAKQLDEKGFLERNLNDTRYVSRFLCQFISEHLHLTGKGKKRVFASNGQITALLRGRWGLSKNREENDRHHAVDAVVVACSTVAMQQKITQFVRYQKGNVFTGERIDKETGEVISIHFPTPWEHFREEVMIRVFDDNPLRTLPEKLPNRPEALHEYVMPLFVSRMPTRKMTGQGHKETIKSAKRLDEKISVLRVPLTQLKLNDLENMVNREREPALYEALKARLEQFKNDPAKAFAEPFFKQGGQQVKAVRVEIVQKSGMLLRKINGVADNGSMVRVDVFEKSGKFYLVPIYAWQVAEGILPNYAVVAHKDESDWILMDESYHFKFALYKNDLLEVQTKKGGIMGYFASLDRATGAITIREHDRDKKKCKDGEHRSIGVKMASSFKKLQVDELGKNIHETRSRKRPNIG

SEQ ID NO: 222 - protein, 1130 aa, Streptococcus pasteurianus
MTNGKILGLDIGIASVGVGIIEAKTGKVVHANSRLFSAANAENNAERRGFRGSRRLNRRKKHRVKRVRDLFEKYGIVTDFRNLNLNPYELRVKGLTEQLKNEELFAALRTISKRRGISYLDDAEDDSTGSTDYAKSIDENRRLLKNKTPGQIQLERLEKYGQLRGNFTVYDENGEAHRLINVFSTSDYEKEARKILETQADYNKKITAEFIDDYVEILTQKRKYYHGPGNEKSRTDYGRFRTDGTTLENIFGILIGKCNFYPDEYRASKASYTAQEYNFLNDLNNLKVSTETGKLSTEQKESLVEFAKNTATLGPAKLLKEIAKILDCKVDEIKGYREDDKGKPDLHTFEPYRKLKFNLESINIDDLSREVIDKLADILTLNTEREGIEDAIKRNLPNQFTEEQISEIIKVRKSQSTAFNKGWHSFSAKLMNELIPELYATSDEQMTILTRLEKFKVNKKSSKNTKTIDEKEVTDEIYNPVVAKSVRQTIKIINAAVKKYGDFDKIVIEMPRDKNADDEKKFIDKRNKENKKEKDDALKRAAYLYNSSDKLPDEVFHGNKQLETKIRLWYQQGERCLYSGKPISIQELVHNSNNFEIDHILPLSLSFDDSLANKVLVYAWTNQEKGQKTPYQVIDSMDAAWSFREMKDYVLKQKGLGKKKRDYLLTTENIDKIEVKKKFIERNLVDTRYASRVVLNSLQSALRELGKDTKVSVVRGQFTSQLRRKWKIDKSRETYHHHAVDALIIAASSQLKLWEKQDNPMFVDYGKNQVVDKQTGEILSVSDDEYKELVFQPPYQGFVNTISSKGFEDEILFSYQVDSKYNRKVSDATIYSTRKAKIGKDKKEETYVLGKIKDIYSQNGFDTFIKKYNKDKTQFLMYQKDSLTWENVIEVILRDYPTTKKSEDGKNDVKCNPFEEYRRENGLICKYSKKGKGTPIKSLKYYDKKLGNCIDITPEESRNKVILQSINPWRADVYFNPETLKYELMGLKYSDLSFEKGTGNYHISQEKYDAIKEKEGIGKKSEFKFTLYRNDLILIKDIASGEQEIYRFLSRTMPNVNHYVELKPYDKEKFDNVQELVEALGEADKVGRCIKGLNKPNISIYKVRTDVLGNKYFVKKKGDKPKLDFKNNKK

SEQ ID NO: 223 - protein, 1119 aa, Lactobacillus coryniformis
MGYRIGLDVGITSTGYAVLKTDKNGLPYKILTLDSVIYPRAENPQTGASLAEPRRIKRGLRRRTRRTKFRKQRTQQLFIHSGLLSKPEIEQILATPQAKYSVYELRVAGLDRRLTNSELFRVLYFFIGHRGFKSNRKAELNPENEADKKQMGQLLNSIEEIRKAIAEKGYRTVGELYLKDPKYNDHKRNKGYIDGYLSTPNRQMLVDEIKQILDKQRELGNEKLTDEFYATYLLGDENRAGIFQAQRDFDEGPGAGPYAGDQIKKMVGKDIFEPTEDRAAKATYTFQYFNLLQKMTSLNYQNTTGDTWHTLNGLDRQAIIDAVFAKAEKPTKTYKPTDFGELRKLLKLPDDARFNLVNYGSLQTQKEIETVEKKTRFVDFKAYHDLVKVLPEEMWQSRQLLDHIGTALTLYSSDKRRRRYFAEELNLPAELIEKLLPLNFSKFGHLSIKSMQNIIPYLEMGQVYSEATTNTGYDFRKKQISKDTIREEITNPVVRRAVTKTIKIVEQIIRRYGKPDGINIELARELGRNFKERGDIQKRQDKNRQTNDKIAAELTELGIPVNGQNIIRYKLHKEQNGVDPYTGDQIPFERAFSEGYEVDHIIPYSISWDDSYTNKVLTSAKCNREKGNRIPMVYLANNEQRLNALTNIADNIIRNSRKRQKLLKQKLSDEELKDWKQRNINDTRFITRVLYNYFRQAIEFNPELEKKQRVLPLNGEVTSKIRSRWGFLKVREDGDLHHAIDATVIAAITPKFIQQVTKYSQHQEVKNNQALWHDAEIKDAEYAAEAQRMDADLFNKIFNGFPLPWPEFLDELLARISDNPVEMMKSRSWNTYTPIEIAKLKPVFVVRLANHKISGPAHLDTIRSAKLFDEKGIVLSRVSITKLKINKKGQVATGDGIYDPENSNNGDKVVYSAIRQALEAHNGSGELAFPDGYLEYVDHGTKKLVRKVRVAKKVSLPVRLKNKAAADNGSMVRIDVFNTGKKFVFVPIYIKDTVEQVLPNKAIARGKSLWYQITESDQFCFSLYPGDMVHIESKTGIKPKYSNKENNTSVVPIKNFYGYFDGADIATASILVRAHDSSYTARSIGIAGLLKFEKYQVDYFGRYHKVHEKKRQLFVKRDE

SEQ ID NO: 224 - protein, 1126 aa, Lactobacillus farciminis
MADRISLGLDIGVASVGFSVLDIDKGKVIELGARLFSATVAAGNQDRRDMRGARRLLNRNKQRRQDTGKLFKKFGLIDDFDKGSFYDNFNQNLNPYELRVKGLTEQLTKEELAESLYQIVKHRGISYALKDADVDEGGTDYSVSLKINSQELAEKTPAQIQLQRLNDYGKVRGQVVIGDDPDNQKVLLNVFPTSAYEKEAKQIIATQQQFYPESLTDKFTEEYCQILTRKRDYFVGPGNEKSRTDYGIYKTDGRTLDNLFEELIGHDKIYPEELRASAASYTAQLFNVLNDLNNLRILNYEDGKLTKEDKEKIIAEIKNNTTTINMLNVIKKVAGCSKDDIKGFRVNEKDKPEISSMPVYRKIHKDLLKAGVDISDWPVEFIDELSFILTLNTENGEIRKQLNNRLAPKFDFLNADLIQLIIDNKDSFEIKTNNKWHRFSVKTMNKLIPEMMERPVEQMTLLNEMGLVKKDKKRFENNKYLPYKEIAKDIFNPVASKSVREALKIVNAVLKKYGHIDYLVVEMPRDKNLKEEQDNIKEFQNKNKKAKDAAFEAFVKSVGSEQRVKEALSKNRKLQMKMRLWYQQQEIDPYNGKTIDATDLINNPDKFEIDHIIPQSISFYDSINNKTLCFASMNQVKGQKTPYEFMLEGHGQSYDKFKATVMANKNFGKAKRANYLFEENVSDIETRKRFLSRNLVDTRYSSRVVLNSLQDFFREKSADTKVTVIRGKFTSNMRKHWHIDKTRETFHHHAIDASIIAATPFLRMWKKGGTIFPVKVGEESIDIETGEILDDKNFDKAMYEEPYSGFVSEIMNADDRIKFSHQVDKKMNRKVSDATIYSTRTGKLAKDKKDAEYIVAKVKDIYSVDGFKKFKKVYDKDKTKFLLYKYDPRTFSKLERIISDCPDKVEKVQTNGKVKAVDISPFEMYRRDHGMIKKYSKKGNGPAIKQLKYLDKKLGSHIDITPANANGKHVILQSLKPWRTDVYLNHETGEYEIMGIKYSDLKFNKNEGYGIKKDKYLEIKKVEEVSEKSEFMFSLYRKDRVKVQDMKTGESVELLFWSRNFSNKKYAELKPISQAENDKKLPVYGKGRLIKRLIPKNCKIWKVNTTILGDPYYLEKESDSPKDILD

SEQ ID NO: 225 - protein, 1380 aa, Eggerthella sp.
MNLRHVGNYNIGLDMGTASVGWAAIDEQGELLHFKGKPTWGSRLFDSANTAATARMPRGQRRRYIRRRWRLDLLQKFFSEEMAEKDPEFFIRLRQSSLWPEDREGGHTAYHWPLFNDSDFNEKEYYEKFPTIFHLRQWLMETDEKADIRLIYLAFHNIVKHRGNFLQENNDSLSAQNANMRESLESFCIALEEWCDEKELTCSCDPQKLEHLFKEVKYRSDIRDGFAALLGLACSGENEVDVKAMAKEMGKAIVGYKADFSKIFTECDKEGSSFRLSDDEGPEAFLDICPDDGIALFEAIQMVYSSFILTGMLTEKGLSLSKISAYNQYGQDLESLKALVKEYVPNEYSSFFRGPTYSGSTEYDPSKAQGYTRYNLGPSKKGSGAKPMAYEDFKKSVEQLFANTNAINDERYKEMMGRFAEEKFLRRLRTSDNGRIPFQLNLEEMTAIIINQGKYYPFLLEQQEKLESLVRFRIPYYVGPLTRINARLDSKGNACFAWSKRKDGMDSASIKPWNWDEVIDKHASAQAFIERMTGTCTYLRGEPVLPRCSLLYEEYCVLNELNGARWTQDGDKFIRFDYKDRSDIIEELFKKRRGRIQYAAVADWMKQERSHANVHVSGGQGENAFESRLSSYHFFCNDVFGVDELPGSYVDMVEEIILWSTLFEDRSILREEIQRKYGDVLNEEQIKTICKKRFSGWGRLSRKLLCSLKAQTDNGPKSIMDILQEGDQNNGRVGRAMVFQEILHDEQLGFEQKIEEENTQSMLEGENLLIEDLPGSPAIRRSINQAVRIVDEIVGIAGHAPDNIFIEVTREDDTKKKGKRTTTRYSNIQKALEALKEEGAEALRELKTYKHNELDKRLSLYFMQNGKSLYSGIPLDIRRLSEYQIDHIIPQSYIKDDSYENMALVLPGENQSKADNLLISQDIRIKMKATWTALHKAGLMGDKKYNNLMNSSISDAKMKGFINRQLVETSQSVKLTQMMLSQKYPGAKVRPIKASISSQLRDACDLVKCREANDYHHAHDAYLACQVGRFVLKRHSSMFDNPIGMTKVIRDFVKRQGQEFKRNGKLPAYASRSGFIVQSFMRSGFDAETGELLRDDWNAPFEIARIKRCLNYRDCYISRMPMEDSGAFWDATIYSPKAGKKGALPVKQGLPVEKYGSYSREQFAYFFVYKAYNPKKKAYRLEFEAVPVRVASAVETRENALEEYAKSVAKQAGLEFVEVARPKVYKYQLIELGEDRLYITGKREVRNASQLAFSLDEIDLLKRLAEGEETSSEERERLFDVLIEKYARYAPRLARQLSVDSMSATFETLNAEEQLGILLSLVEIANGKRNMIDLSSAGGSKNAGCMNPTFSSELSSPGSNFTFIDQSVTGMFERRQRLEL

SEQ ID NO: 226 - protein, 1430 aa, Capnocytophaga canimorsus
MKHILGLDLGTNSIGWAVVKEAQNDNEQSEIVDVGVRVNPLTTDEKTNFEKGKPISTNADRTLKRSARRNLQRYKLRRKELIELLKEHQLISTDTILTENGKGTTFQTLELRAKSAKEKISLEELARVFLTINKKRGYKSSRKAKNEDEGQLIDGMEIAKRLYEENLTTGQLSLQLLKEGKKSLPDYYRSDLQFELDKVWNFQKQFHSHILTDEFYAQLKGKGQRATSALFLAKYQIYTAENKGSREDKKLQAYQWRVDALSKELTREQLAFVITEINNNLNNSSGYLGAISDRSKELYFNNETVGEYLWKQIAANPHTSLKNQVFYRQDYLDEFEQIWKTQSAFYPEILTDELKKELRDVVIFYQRKLKSQKSLVSFCEFENKEIEIKKEDGTSTKKVIGLKVAPKSSPLFQEFKIWQNLNNVLIRKKGSKTKKVDKNQQAVLFEEEKTIFELDLEAKQALFNELNLKGNLKAYYCLEILGYSPKEWEMNYSVLEGNRTNKALYEAYLKITDLEGYDAKNHLKVKLNKDEVELDDLKVPASEIKDMVQAIFKEAGINTDILHFNAELDGKDFENQASYQLWHLLYSYEGDDSKSGNELLYKLLETKFGFKKEYAQILANVSLSDDYGSLSTKAMRKIHPYIKENKFSTACELAGYRHSKHSLTKEENDNRVLKDSLEVLKKNSLRQPVVEKILNQMINLVNALLKKYRTENPNFKFDEIRIELARELKKNAEERANMTVNINKAKTEHEKIIKILKNEFGLPNPTRNDIIRYRLYEELKANGYKDLYTNEYIEKQDLFTKNIDIEHIIPKSRVFDDSFSNKTLSFRKTNLDKGERTAFDYIESKFGADKLEEYVARVEDLYKNNIISKAKYQKLLKKESEIGDGFVERDLRETQYIAKKAKEILLQITPNVLSTSGGITDRLREDWDLINVMKELNLPKYRALGLTQMEDRKYGQQVEVIIDWTKRNDHRHHAMDALTVAFTKHNHIQYLNYLNARKNEKHREHSNIMGIQQLETIKVTDKNGNEKRVFKAPMPNFRQVTKAFLENVLISHKAKNKVVTKNKNKVAGSNKVQEVLTPRGQLHKETVYGKYQYYVQKEEKIGGKFDLETIKKVANPLYQSLLKKRLEENGGDPKKAFTGKNSLAKNPIYLDDAQTEQLPEKVKLVWLENSFSIRKDITPENFKDEKLIDKILDEGVKRILKERLQSFGNDAKKAFSDLDKNPIWLNKEKGIAIKRVAISGVANAEPLHTKKDHLGKEILDKEGKSIPVDFISTGNNHHVAVYRDEKGNLQEKVVSVFEAVVRANQGLPIIDKTYNQHLGWEFLFTMKQNEMFVFSNESTGFNPNDIDLLDPKNKKIISPNLFRVQKFSKLQYGNSFVREFVFRHHLETTVEDRKELQGITYKQMKNSAFFNDIIKVRINHLGGIVSVGEY

SEQ ID NO: 227 - protein, 1348 aa, Finegoldia magna
MKSEKKYYIGLDVGTNSVGWAVTDEFYNILRAKGKDLWGVRLFEKAKTAADTRTFRSGRRRNDRKGVRLQILREIFEDEIKKVDKDFYDRLDESKFWAEDKKVSGKYSLFNDKNFSDKQYFEKFPTIFHLRKYLMEEHGKVDIRYYFLAINQMMKRRGHFLIDGQISHVTDDKPLKQQLILLINDLLKIELEEEFMDSIFEILADVNEKKTEKKNILKELINAQDFNKQEGKILYSIFESIVTGKAKIKNIISDEDILEKIKEDNKEDFVLTGDSYEENLQYFEEVLQENITLFNTLKSAYDFVILQSILKGKSTLSDAQVERYDEHKKDLEILKKVIKKYDEDGKLFKQVFKEDNGNGYVSYIGYYLNKNKKITAKKKISNIEFTKYVKGILEKQCDCEDEDVKYLLGKIEQENFLLKQISSINSVIPHQIHLFELDKILENLAKYYPSFNNKKEEFTKIEKIRKTFTFRIPYYVGPLNDYHKNNGGNAWIFRNKGEKIRPWNFEKIVDLHKSEEEFIKRMLNQCTYLPEETVLPKSSILYSEYMVLNELNNLRINGKPIDTDVKLKLIEELFKKKTKVTLKSIRDYMIRNNFADKEDFDNSEKNLEIVSNMKSYIDFNNILGDKFELEMVEDLIEKITIHTGNKKLLKKYIEETYPDLSSSQIQKIINLKYKDWGRLSRKLLDGITGTNIETGEIDTVINFLRNSSDNLMQIIGSQNYSFNNDIDKLRKKYIPQEISYEVVENLYVSPSVKKMIWQVIRITEEITKVMGYDPDKIFIEMAKSEEGKKTTISRKNKLLALYKAIKKDERDSQYEKLLTGLNKLDDSDLRSRKLYLYYTQMGRDMYTGEKIDLDKLFDSTHYDKDHIIPQSMKKDDSIINNLVLVNKNANQTTKGNIYPVPSSIRNNPKIYNYWKYLMEKEFISKEKYNRLIRNTPLTNEELGGFINRQLVETRQSTKAIKELFEKFYKKSKIIPVKAILASDLRKDMNTLKSREVNDLHHAHDAFLNIVAGDVWNREFTSNPINYVKENREGDKVKYSLSKYFTRPRKSKGKVIWTPEKGRKLIVDTLNKPSVLISNESHVKKGELFNATIAGKKDYKKGKIYLPLKKDDRLQDVSKYGGYKAINGAFFFLVEHTKSKKRIRSIELFPLHLLSKFYEDKNTVLDYAINVLQLQDPKIIIDKINYRTEIIIDNFSYLISTKSNDGSITVKPNEQMYWRVDEISNLKKIENKYKKDAILTEEDRKIMESYIDKIYQQFKAGKYKNRRTTDTIIEKYEIIDLDTLDNKQLYQLLVAFISLSYKTSNNAVDFTVIGLGTECGKPRITNLPDNTYLVYKSITGIYEKRIRIK

SEQ ID NO: 228 - protein, 1352 aa, Megasphaera sp.
MKKRNREEYYVGLDIGTSSVGWAVATPDYRIPKFRGHKMWGSRLFAEGKRAAERRQFRTNRRRLARRRDRLQILEELFAEEMAKVDNTFFMRLKESKFFLEDKTVKEKHILFSTDKFDADRFYKDNPTIYHVRKRLMEEEPQDIRELFLAVHHILKYRGHFLFAGSLEQNGASIEELVRTLLGKQGLAILDDTIDSNEMVNILKNTGETKSDRKKDVQELWNPLKDKVKKAQAAEMAGLVLGLKSDISKLFANSDYKDLDSSIKNINFSSGDYEEKRDDYANSIGDDIVLLDTMKALYDTLILSQILQGKRSISAAKVEDYNTHKEQLRALKAILKPHKRLYNEMFRENNKKDLSNYVAYISSYSEGKRVNREGFYKYVQAVLKQVDDSDSKQAILEAIRLETFLPLLRVKDNAVIPHQIHQAELEAILETARKKYNFLNDVSDGVSVKDKIIQLFTFRIPYYVGPLNPHSGETVADRKQGTGWVVRKQRGKVYPWNFADMVDVKASAEAFITNLTNKCTYLIGEDVLPKRSLLYSEFMLLNELNMIKYDGHELPVAIKQLYIEQVFKQEHKKQTKGRVLDFLKRNGLITGSATAVITGMDDAIKGDLQSYRDMVRIFGAGFDHSMAERIIRWVTLFGEAKDILENKIREVYGNSISDSQMRAIKKLKYADWGRLSQAFLIAVKGCDKSGVERNIITCLRASSQNLMEILSDQGTYIKQIKAWNHQHTTNMMDTLDYQLVDDLYVAPSVKRSIWQSLCIVEELVKIMGQAPKKIFVEVTRTKQAEKTKKDSRKKRLVELYTAIGKEGAAWKKEIEAHQAGDFRRKKLYLYYTQMGRCMYSNEPIAMDALFTSAYDIDHIYPQSLTKDGSWDNLVLVKSQLNKEKSDQYPLRPAIREKNKAHWQYLCRAGFISEKKYERLMRTTELTAEELSGFIARQLVETSQATKAVTGLLERIYTNTEICFVKAETVSQFRHQHNFIKIRELNNYHHAKDAYLNIVVGNVYHEKFTKNPWEFIARSTERRPYNLNRMYDFDLLKQGRVIWQVPKSLETVQAMMKSNDVRITKKLLVQKGELYDATITKAHKAKEGTYFPLKGADARLRDVHRYGGYEKIKIAYYSVFSCREKASNTIHTLIIPIPVYKAGLLQTEADLTAYAWQTKQKTKPIKDIYSAITPIYKKLCINTVVKIDGFKYFLGGKTGDYMWLDPAIPVVLDEQAAAYLKAISKVGRADDVENTAQAIDLITAEANEAFYDVLLKKMEAKIFAKAYQTIVEKLASETARERFRELSIGAQCSCLLEILNLLANNKTTFTFFKDKMGVTMSRRKQPMDLTKLEECIVYETSITGLYEKAVSLL

SEQ ID NO: 229 - protein, 650 aa, Haemophilus pittmaniae
MENKNLHYILGLDLGIASVGWAVVEIDKEENPLCLIDVGVRTFERAEVPKTGESLALSRRLARSARRLTQRRVARLKKAKRLLKLENILLSTDERLPHQVWQLRVEGLDRKLKRQEWAAVLLHLIKHRGYLSQRKNESKSENKELGALLSGVASNHELLQQTTYRTPAELAVKKFEVEEGHIRNQQGAYTHTFSRLDLLAEMELLFSRQQHFGNPFASEKLLENLTALLMWQKPALSGEAILKMLGKCTFEDEYKAAKNTYTAERFVWITKLNNLRIQENGLERALNDNERLILIEQPYEKAKLTYAQVRSILNLSDEAIFKGLRYSGEDKKAIETKTTLMEMKAYHQIRKVLEGNNLKAEWTELKENSTLLDEIGTAFSLYKTDEDISTYLAGKLSQPVLNALLENLSFDKFIQLSLKALYKLLPLMQQGLRYDEACHEMYGDHYGKKTYGKKTEENHYFLPQIPADEIRNPVVLRTLTQARKVINGVVRLYGSPARIHIETGREVGKSYKDRRELEKRQEENRKQRENAIKEFKEYFPHFAGEPKAKDILKMRLYKQQNAKCLYSGKPIELHRLLEKGYVEVDHALPFSRTWDDSFNNKVLVLANENQNKGNLTPFEWLDGKHNSERWRAFKALVETSAFPYAKNNAS

SEQ ID NO: 230 - protein, 1062 aa, Ralstonia syzygii
MAEKQHRWGLDIGTNSIGWAVIALIEGRPAGLVATGSRIFSDGRNPKDGSSLAVERRGPRQMRRRRDRYLRRRDRFMQALINVGLMPGDAAARKALVTENPYVLRQRGLDQALTLPEFGRALFHLNQRRGFQSNRKTDRATAKESGKVKNAIAAFRAGMGNARTVGEALARRLEDGRPVRARMVGQGKDEHYELYIAREWIAQEFDALWASQQRFHAEVLADAARDRLRAILLFQRKLLPVPVGKCFLEPNQPRVAAALPSAQRFRLMQELNHLRVMTLADKRERPLSFQERNDLLAQLVARPKCGFDMLRKIVFGANKEAYRFTIESERRKELKGCDTAAKLAKVNALGTRWQALSLDEQDRLVCLLLDGENDAVLADALREHYGLTDAQIDTLLGLSFEDGHMRLGRSALLRVLDALESGRDEQGLPLSYDKAVVAAGYPAHTADLENGERDALPYYGELLWRYTQDAPTAKNDAERKFGKIANPTVHIGLNQLRKLVNALIQRYGKPAQIVVELARNLKAGLEEKERIKKQQTANLERNERIRQKLQDAGVPDNRENRLRMRLFEELGQGNGLGTPCIYSGRQISLQRLFSNDVQVDHILPFSKTLDDSFANKVLAQHDANRYKGNRGPFEAFGANRDGYAWDDIRARAAVLPRNKRNRFAETAMQDWLHNETDFLARQLTDTAYLSRVARQYLTAICSKDDVYVSPGRLTAMLRAKWGLNRVLDGVMEEQGRPAVKNRDDHRHHAIDAVVIGATDRAMLQQVATLAARAREQDAERLIGDMPTPWPNFLEDVRAAVARCVVSHKPDHGPEGGLHNDTAYGIVAGPFEDGRYRVRHRVSLFDLKPGDLSNVRCDAPLQAELEPIFEQDDARAREVALTALAERYRQRKVWLEELMSVLPIRPRGEDGKTLPDSAPYKAYKGDSNYCYELFINERGRWDGELISTFRANQAAYRRFRNDPARFRRYTAGGRPLLMRLCINDYIAVGTAAERTIFRVVKMSENKITLAEHFEGGTLKQRDADKDDPFKYLTKSPGALRDLGARRIFVDLIGRVLDPGIKGD

SEQ ID NO: 231 - protein, 1052 aa, Haemophilus parainfluenzae
MENKNLHYILGLDLGIASVGWAVVEIDEKENPLRLIDVGVRTFERAETQKGESLALSRRSARSARRLTQRRVARLKKAKRLLKSENILLSTDERLPHQVWQLRVEGLDRKLERQEWAAVLLHLIKHRGYLSQRKNESKSENKELGALLSGVASNHELLQQATYRTPAELAVKKFEVEEGHIRNQQGAYTHTFSRLDLLAEMELLFSRQQHFGNPFASEKLLENLTALLMWQKPALSGEDILKMLGKCTFEDEYKAAKNTYTAERFVWITKLNNLRIQENGLERALSDNERLMLIEQPYEKAKLTYAQVRSILNLSDDAIFKGVRYSGEDKKAIETKTTLMEMKAYHQIRKVLEGNNLKAEWVALKANPTLLDEIGTAFSLYKTDEDISAYLAGKLSQPVLNALLENLSFDKFIQLSLKALYKLLPLMQQGLRYDEACREIYGDHYGKKTEETHHFLPQIPADEIRNPVVLRTLTQARKVINGVVRLYGSPARIHIETGREVGKSYKDRHELKKRQEENRKQREKTISEIKTLFPNFSGEPKGKDILKMRLYYQQNAKCLYSGKPLELHRLFEQKYVEVDHALPLSRTWDDSFNNKVLVLANENQNKGNLTPFEWLDGKNNSERWRTFKALVETSAFPYAKKQRILSQKLDEKGFIERNLNDTRYVARFLCNFIADNMHLTGEGKRKVFASNGQITALLRRRWGLAKSREDNDRHHALDAVLVACSTVAMQQKITRFVRFKAGDVFTGERIDRETGEIIPLHFPTPWQFFKQEVEIRIFSDNPKLELENRLPDRPQANHEFVQPLFVSRMPTRKMTGQGHMETVKSAKRLNEGISMIKMPLTKLKLKDLELMVNREREKDLYDALKTRLEAFNDDPAKAFAEPFMKKGGAIVKSVRVEQVQKSGVLVRQGNGVADNASMVRVDVFTKDGKYFLVPIYTWQVAKGILPNKAVIQGKDEEDWEDIDDATFQFSLHPNDLISVKTKKDEFLGYFNGLNRHTGGINIRTHDLEKSKGKQGIFEGIGVKIALSFEKYQIDELGKNIRLCKPSKRQPVR

SEQ ID NO: 232 - protein, 1331 aa, Lactobacillus sanfranciscensis
MNKQPYNIGLDIGTSSVGWSATELDNRLLHIKGHNGIGVRLFKEGESAADRRGFRTTRRRLARRKWRLRLLNEIFATEIAKVDPSFFARLKQSNVSPKDPNKTMFENILFDDENLDDQKFHHDYKTIYHLRQAIINHPEQKFDIRLIYLAMHHIIKYRGHFLNQANVQDFKGGKIDLEKSFKALNDIFENQGRDLRLVTDKANQYVKVLSDNAKTRSDRKKELSKLLYVPIDKDTDKNSKKVTGEILKAILGNKAKFDVIFGIEVENPKEWVLTFNSDDFDDKIEGLSSQMTDEDSEILLILKELYFALNLSDILNNSVTDKNAKTLSEAMINRYDDHKNQLAMLKKVIDSSDKKHAKELKEAYSAYIDGENNKKISFEDLKKRIQKNLVDSELSQKINDLLDHDYFLPKQRSKENGAIPHQLQQQELDQIIESQKQYYPFLAELNPNEKRSRQAKYKLDELVAFRVPYYVGPMVEVTDSNQENNGKFAWMIRKEQGEITPWNFDEKVDRTETATKFITRMTTTDTYLIGEPVLPKNSLLYQKFVVLNELNNLKINQEIITPGQKQYLYEHVMKKNKRVTLKKIADALVIKGDYPYAPEVKGTTDQKNLNNGLTTYIDLAKIFGNELDDVDREADFEKIIEWSTIFEDQHIFALKLQELKWLTEKQRNQVVKLRYQGWGKLSKELLAGLVDDNGQRIIDLLWSDNQNFMQIVNQKSFKESIADHNGAHLEEKNLKDVINDLYTSPQNKKAIRQVILVVDDIINAVGYEPANIMMEFAREDSNDHRLTNSRSRQLENVYKDITNSWFDNDSVKDELEDKIKNKDKFTDRLYLYFTQGGKDLYTGEPLNIDDLSSYDIDHILPQSFILDNSLDNRVLTSQRNNRVSKEDQLPGELFGTKMHAFWKRLKAAHLISNKKYYNLTLTPNSISKFNNQGRFINRQLVETRQVIKLAAEILHNRYSEEKGTNIVTIKANLTHHMREKFNFYKNRNVNDYHHAFDAYLTAFVGNWLLQQYPKLKPYFVYGDFAKTEINNLKSFNMLYKFEQAHQLNEKDGKIAKDADALLGYMKNVYHFKKMLVTKKLETNHGALFKQTLYPSPAHDIKKRQLIKPKDNRPTDIYGGYTHEERKYMSLVKVIGKKDNEYRMANVPLLKINKNNDIKEILKSQFSNKKFEIVLPKVLKNQLFSENGALFVIGSKGYKYNANQLVLSDLDMKLLNDLSNNKSIDEVTINQLFKNIVDSTNKYMPLYEIKNLNEVVEKFNNLEFNDKKKTITDFLLATHANPTMSNLKNIGLPSYFGRFTSGNAGIKLSENANVIYQSPTGLFSRKVKISDF

SEQ ID NO: 233 - protein, 1473 aa, Flavobacterium branchiophilum
MAKILGLDLGTNSIGWAVVERENIDFSLIDKGVRIFSEGVKSEKGIESSRAAERTGYRSARKIKYRRKLRKYETLKVLSLNRMCPLSIEEVEEWKKSGFKDYPLNPEFLKWLSTDEESNVNPYFFRDRASKHKVSLFELGRAFYHIAQRRGFLSNRLDQSAEGILEEHCPKIEAIVEDLISIDEISTNITDYFFETGILDSNEKNGYAKDLDEGDKKLVSLYKSLLAILKKNESDFENCKSEIIERLNKKDVLGKVKGKIKDISQAMLDGNYKTLGQYFYSLYSKEKIRNQYTSREEHYLSEFITICKVQGIDQINEEEKINEKKFDGLAKDLYKAIFFQRPLKSQKGLIGKCSFEKSKSRCAISHPDFEEYRMWTYLNTIKIGTQSDKKLRFLTQDEKLKLVPKFYRKNDFNFDVLAKELIEKGSSFGFYKSSKKNDFFYWFNYKPTDTVAACQVAASLKNAIGEDWKTKSFKYQTINSNKEQVSRTVDYKDLWHLLTVATSDVYLYEFAIDKLGLDEKNAKAFSKTKLKKDFASLSLSAINKILPYLKEGLLYSHAVFVANIENIVDENIWKDEKQRDYIKTQISEIIENYTLEKSRFEIINGLLKEYKSENEDGKRVYYSKEAEQSFENDLKKKLVLFYKSNEIENKEQQETIFNELLPIFIQQLKDYEFIKIQRLDQKVLIFLKGKNETGQIFCTEEKGTAEEKEKKIKNRLKKLYHPSDIEKFKKKIIKDEFGNEKIVLGSPLTPSIKNPMAMRALHQLRKVLNALILEGQIDEKTIIHIEMARELNDANKRKGIQDYQNDNKKFREDAIKEIKKLYFEDCKKEVEPTEDDILRYQLWMEQNRSEIYEEGKNISICDIIGSNPAYDIEHTIPRSRSQDNSQMNKTLCSQRFNREVKKQSMPIELNNHLEILPRIAHWKEEADNLTREIEIISRSIKAAATKEIKDKKIRRRHYLTLKRDYLQGKYDRFIWEEPKVGFKNSQIPDTGIITKYAQAYLKSYFKKVESVKGGMVAEFRKIWGIQESFIDENGMKHYKVKDRSKHTHHTIDAITIACMTKEKYDVLAHAWTLEDQQNKKEARSIIEASKPWKTFKEDLLKIEEEILVSHYTPDNVKKQAKKIVRVRGKKQFVAEVERDVNGKAVPKKAASGKTIYKLDGEGKKLPRLQQGDTIRGSLHQDSIYGAIKNPLNTDEIKYVIRKDLESIKGSDVESIVDEVVKEKIKEAIANKVLLLSSNAQQKNKLVGTVWMNEEKRIAINKVRIYANSVKNPLHIKEHSLLSKSKHVHKQKVYGQNDENYAMAIYELDGKRDFELINIFNLAKLIKQGQGFYPLHKKKEIKGKIVFVPIEKRNKRDVVLKRGQQVVFYDKEVENPKDISEIVDFKGRIYIIEGLSIQRIVRPSGKVDEYGVIMLRYFKEARKADDIKQDNFKPDGVFKLGENKPTRKMNHNQFTAFVEGIDFKVLPSGKFEKI

SEQ ID NO: 234 - protein, 933 aa, Mycoplasma iowae
SVRDYSDGPGSEKSPTPYGLWRLNKEGKVEKIGENLWDVLVGKCTIYGNDDSIKDEKTKLRGGKNSPIAEVFNFINDLTNIYLFSSSKLKLNSKTKLSILDEFNISLKTSKPIKSFSEKKLVKHIISTTEFKDINFDDVYGYRIDTSKKPLFTKLENTITIAKWLLDNNVYNELNIYDQEDLIKINNIFVILQKSMDINKRAQLVSDEYKIDLPICLELVKKIKGVMQTHSFSYKAMLEYIPVGIKYNDLETGEDTSINASTYFVDKINNLNTKLLFNGRPRKYIPKNIFEDGIISPTSKRAFIQTINVLNKIIKVYSKDYDIDNIAIELPRDKNTAEERKKISSNQKKAGEEIAEVLKFAGLNVEEYTSKLNSKTKLKLKLLKEQNYKDIYDGQEIDVIDVIKNSNKYHEEHIIPYSLCFIDSRRNKVLTKFENNKQKGNKTPFQWLSSIGKYAEFKDRVEKLFVEQKISKAKKELLLFEQDPRTEMLGFIEKNLSDTRYASKLVFDTFRDFFKVNNPNVKIKVINGALTNYARYNLFATYKDGLLERKGIMKQREFYEHHGIDATILAFLGSNHKINQLLKLSHKFKKQDDNKIYDENTGELIEFTKDFLSDEARKKAMELSKQIFEIPCKFSRPIYRKSNVSFSNETLISMKWIDDKYTKGVKINKLSLVNKDLDLNEYFADYETNEMKNLICYQEDKTLYNKLKNIYDKYNNFVENSNIKPVKNPFINYMISNFSSDDSKIQNFKHIIFYDHKGNKKFVKSLKVCGDEKNLSNIVLRKDQKDIMNSKKIKKSGILESLNPISARIYKDNKGKYITIPINSLVLNWTKKGLEIDNEKLCNILKSKNIFNNQFIEINAGQSIINNENKLFYFVGGGDFKVNKLEIKSQFCDNEIFFPRKQMNISIATIIDNYKLCEVDELGKIYNIRKIVL

SEQ ID NO: 235 - protein, 1358 aa, Acidaminococcus intestini; identical to SEQ ID NO: 99

SEQ ID NO: 236 - protein, 983 aa, Campylobacter jejuni
MARILAFDIGISSIGWAFSENDELKDCGVRIFTKAENPKTGESLALPRRLARSARKRLARRKARLNHLKHLIANEFKLNYEDYQSFDESLAKAYKGSLISPYELRFRALNELLSKQDFARVILHIAKRRGYDDIKNSDDKEKGAILKAIKQNEEKLANYQSVGEYLYKEYFQKFKENSKEFTNVRNKKESYERCIAQSFLKDELKLIFKKQREFGFSFSKKFEEEVLSVAFYKRALKDFSHLVGNCSFFTDEKRAPKNSPLAFMFVALTRIINLLNNLKNTEGILYTKDDLNALLNEVLKNGTLTYKQTKKLLGLSDDYEFKGEKGTYFIEFKKYKEFIKALGEHNLSQDDLNEIAKDITLIKDEIKLKKALAKYDLNQNQIDSLSKLEFKDHLNISFKALKLVTPLMLEGKKYDEACNELNLKVAINEDKKDFLPAFNETYYKDEVTNPVVLRAIKEYRKVLNALLKKYGKVHKINIELAREVGKNHSQRAKIEKEQNENYKAKKDAELECEKLGLKINSKNILKLRLFKEQKEFCAYSGEKIKISDLQDEKMLEIDHIYPYSRSFDDSYMNKVLVFTKQNQEKLNQTPFEAFGNDSAKWQKIEVLAKNLPTKKQKRILDKNYKDKEQKNFKDRNLNDTRYIARLVLNYTKDYLDFLPLSDDENTKLNDTQKGSKVHVEAKSGMLTSALRHTWGFSAKDRNNHLHHAIDAVIIAYANNSIVKAFSDFKKEQESNSAELYAKKISELDYKNKRKFFEPFSGFRQKVLDKIDEIFVSKPERKKPSGALHEETFRKEEFYQSYGGKEGVLKALELGKIRKVNGKIVKNGDMFRVDIFKHKKTNKFYAVPIYTMDFALKVLPNKAVARSKKGEIKDWILMDENYEFCFSLYKDSLILIQTKDMQEPEFVYYNAFTSSTVSLIVSKHDNKFETLSKNQKILFKNANEKEVIAKSIGIQNLKVFEKYIVSALGEVTKAEFRQREDFKK

SEQ ID NO: 237 - protein, 1338 aa, Streptococcus macacae
MTKPYSIGLDIGTNSVGWAVVTDGYKVPAKKMKVLGNTDKSHIKKNLLGALLFDSGNTAKDRRLKRTARRRYTRRRNRILYLQEIFAEEMAKADESFFQRLNESFLTNDDKEFDSHPIFGNKAEEEAHHHKFPTIFHLRKHLADSTEKSDLRLIYLALAHMIKFRGHFLIEGQLKAENTNVQTLFDDFVEVYDKTVEESHLSEISVSSILTEKISKSRRLENLIKYYPTEKKNTLFGNLIALSLGLQPNFKTNFKLSEDAKLQFSKDTYEEDLGELLGKIGDNYADLFISAKNLYDAILLSGILTIDDNTTKAPLSASMIKRYEEHQEDLAQLKKFIRQNLPDQYSEVFSDKTKDGYAGYIDGKTNQEAFYKYIKNMLSKTEGADYFLDKIDREDFLRKQRTFDNGSVPHQIHLQEMHAILRRQGEYYPFLKENQDKIEKILTFRIPYYVGPLARKGSRFAWAEYKADKKVTPWNFDDILDKEKSAEEFITRMTLNDLYLPEEKVLPKHSLVYETFNVYNELTKVKYVNEQGKAIFFDANMKQEIFDHVFKENRKVTKDKLLNYLNKEFEEFRIVNLTGLDKENKAFNSSLGTYHDLRKILDKSFLDDKVNEKIIEDIIQTLTLFEDREMIRQRLQKYSDIFTTQQLKKLERRHYTGWGRLSAKLINGIRDKQSNKTILGYLIDDGYSNRNFMQLINDDSLPFKEEIARAQVIGETDDLNQLVSDIAGSPAIKKGILQSLKIVDELVKVMGHNPANIVIEMARENQTTAKGRRSSQQRYKRLEEAIKNLDHDLNHKILKEHPTDNQALQNDRLFLYYLQNGRDMYTEDPLDINRLSDYDIDHIIPQSFIKDDSIDNKVLVSSAKNRGKSDNVPSEDVVNRMRPFWNKLLSCGLISQRKYSNLTKKELKPDDKAGFIKRQLVETRQITKHVAQILDARFNTKRDENKKVIRDVKIITLKSNLVSQFRKDFKFYKVREINDYHHAHDAYLNAVIGKALLDVYPQLEPEFVYGEYPHFHGYKENKATAKKFFYSNIMNFFKKDDIRTDENGEIVWKKDEHISNIKRVLSYPQVNIVKKVEIQTVGQNGGLFDDNPKSPLEVTPSKLVPLKKELNPKKYGGYQKPTTAYPVLLITDTKQLIPISVMNKKQFEQNPVKFLRDRGYQQVGKNDFIKLPKYTLVDIGDGIKRLWASSKEIHKGNQLVVSKKSQILLYHAHHLDSDLSNDYLQNHNQQFDVLFNEIISFSKKCKLGKEHIQKIENVYSNKKNSASIEELAESFIKLLGFTQLGATSPFNFLGVKLNQKQYKGKKDYILPCTEGTLIRQSITGLYETRVDLSKIGED

SEQ ID NO: 238 - protein, 1265 aa, Mycoplasma ovipneumoniae
MHNKKNITIGFDLGIASIGWAIIDSTTSKILDWGTRTFEERKTANERRAFRSTRRNIRRKAYRNQRFINLILKYKDLFELKNISDIQRANKKDTENYEKIISFFTEIYKKCAAKHSNILEVKVKALDSKIEKLDLIWILHDYLENRGFFYDLEEENVADKYEGIEHPSILLYDFFKKNGFFKSNSSIPKDLGGYSFSNLQWVNEIKKLFEVQEINPEFSEKFLNLFTSVRDYAKGPGSEHSASEYGIFQKDEKGKVFKKYDNIWDKTIGKCSFFVEENRSPVNYPSYEIFNLLNQLINLSTDLKTTNKKIWQLSSNDRNELLDELLKVKEKAKIISISLKKNEIKKIILKDFGFEKSDIDDQDTIEGRKIIKEEPTTKLEVTKHLLATIYSHSSDSNWININNILEFLPYLDAICIILDREKSRGQDEVLKKLTEKNIFEVLKIDREKQLDFVKSIFSNTKFNFKKIGNFSLKAIREFLPKMFEQNKNSEYLKWKDEEIRRKWEEQKSKLGKTDKKTKYLNPRIFQDEIISPGTKNTFEQAVLVLNQIIKKYSKENIIDAIIIESPREKNDKKTIEEIKKRNKKGKGKTLEKLFQILNLENKGYKLSDLETKPAKLLDRLRFYHQQDGIDLYTLDKINIDQLINGSQKYEIEHIIPYSMSYDNSQANKILTEKAENLKKGKLIASEYIKRNGDEFYNKYYEKAKELFINKYKKNKKLDSYVDLDEDSAKNRFRFLTLQDYDEFQVEFLARNLNDTRYSTKLFYHALVEHFENNEFFTYIDENSSKHKVKISTIKGHVTKYFRAKPVQKNNGPNENLNNNKPEKIEKNRENNEHHAVDAAIVAIIGNKNPQIANLLTLADNKTDKKFLLHDENYKENIETGELVKIPKFEVDKLAKVEDLKKIIQEKYEEAKKHTAIKFSRKTRTILNGGLSDETLYGFKYDEKEDKYFKIIKKKLVTSKNEELKKYFENPFGKKADGKSEYTVLMAQSHLSEFNKLKEIFEKYNGFSNKTGNAFVEYMNDLALKEPTLKAEIESAKSVEKLLYYNFKPSDQFTYHDNINNKSFKRFYKNIRIIEYKSIPIKFKILSKHDGGKSFKDTLFSLYSLVYKVYENGKESYKSIPVTSQMRNFGIDEFDFLDENLYNKEKLDIYKSDFAKPIPVNCKPVFVLKKGSILKKKSLDIDDFKETKETEEGNYYFISTISKRFNRDTAYGLKPLKLSVVKPVAEPSTNPIFKEYIPIHLDELGNEYPVKIKEHTDDEKLMCTIK

SEQ ID NO: 239 - protein, 1535 aa, Flavobacterium columnare
MTKILGLDLGTNSIGWAIRDTENEGINQILDKGARIFSEGVKSENGKEISRAAERTAYRSARKIKYRRKLRKYETLKVLSINGMCPLSVEEVEQWKKSGFKEYPLNPEFLDWLRTNEDKNINPYLFRDKASKQKVTLFELGRALYHIAQRRGFLSNRLDQSAEGVFEEHNPQIQNLIEDLDSSNTILNELKEYYINLGIIDETEKSGFKKDLDEGEKKLKSLYNSLVAITKKNANDIETCKQELIARLNKKEDLGKVKGKIKDISQAMLDRNFKTLGQYFFSLYNKERIRNQYTSREEHYLEEFIIICQTQGIEGINTNEKLPEKKFTGLAKDLYRAIFFQRPLKSQKGLIGKCSFEKNKSRCAVSHPDYEEFRMWSYLNTIKIGTQSEKTLRFLTLEEKLKLVPKFYRKSDFNFEVLAKELVEKGASFGYYKSSKKNEFFYWFNYKPTDSVSACVVSASLENAIGKDWKIKTFEYQTRNTEKNEVTKSVDYKDLWHLLSVATSDTYLYDFAIEKLKLEPKNAKAFSKTKLKKDFASLSLAAIAKILPYLKQGLLYSHAVFMANIENIVDADIWKDEEQQKFIQSKIVELVDNYIVEKSKLELINGLLKIYNTEDKEGRKVYYSKEAESLFEADLRKKLVPFYKANIIIEEHEQEIIFQDLFPILMDQLKKQEFIKIGRLDKQIEAFLEGENEEGQIFCNHTDKLKKLYHPSDIEVFKKKTIKDEWGNEKVVLGSPLTTSIKNPMAMRALHQLRKVLNTLIANDQIDEDTRIHIEMARELNDANKRKGIQDFQNENKKFREEAIKEIKKLYLEECHKDVNPTEDDILRYQLWLEQGKCEIYEEGNNISICDIIGSNPSYDIEHTIPRSISQDNSQMNKTLCSLKFNRSIKKQKMPVELSNYNDILPRIAHWKKEAEELTRQIETISRSIKSAATKVAKDKNIRKRHYLTLKRDYILGKYERFTWEEPKVGFKNSQIPDTGIITKYAQAYLKSYFKRVESVKGGAVAEFRKLWGIQESFIDENWWKHYKDKDRDKHTHHTIDAITIACMPKDKYDLLAHAWRLEDEQDKKAAKVLIEQAKPWKTFKEDIEKIETEILVSHFTPDNVKKQSKSIIKNRGKKVYVLKNELPVNFKNKIEGKDYFKLKFDSKILYKIPKKKEKQTDTFYEELPKNYLNGVEGKDYFKINTTGKTFYKIPIFNQGDTIRGSLHQETTYGAIKLPDIDIETKKPLHTDKGGFILKKDIKGNEIVFFVVRKEISKISENDVQNIVDNVVRKKIENAIANSLITFKIVKKKKVAVIKEGVTIWMREPNIEKGIEGIPIKKVRIITNSVKNPIEIKVHSPLSKSRHKHKQKVYGQNDENYAMALYELDGKREFELINNFNLAKLLKQSQSYYPLHKEKEIKGKKILVPIEKRNNKDVILKRGQQVVFYDKTVENPKDISEIIDFRERIYIIEGLTIQRQKDKKTSKVNEYGIIQLRHFKEARKSEEISKDNFKPDGEFKINENKPTRKMNHNQFTAFVEGIDFKVLPSGKFQKI

SEQ ID NO: 240 - protein, 1459 aa, Flavobacterium columnare
MKFNLGLDIGTNSIGWALVNEDYENKKGKIIAAGSRIIPMTQDILDKFGSGAITETQTALRTDYRSKRKLIQRFLLRRERLHRVLNVLDFLPKHYAESIDFEKYFGKFLPNTEPKLAYNQNQFIFQNSFLEMLKEFQEKHPELLTNNKKIPYDWTIYYLRKKALNQRIEKEELAWLLLQFNQKRGYNQLRDEEEESVPNKQVEFYSLKIIDVVADQPKEGRDKRWYSINLENGWTYRRESKTPLFNWEGKTKDFIVTTDLNQDGSIKKDKEGKEKRSFRAPSEGDWTLLKKKTEKEIYESGKTLGTYIYDALLNTPDLKIKGDFIRTIDRSIYKEELQQIINKQKEYHLELNSSKLYKACLEELYPKNEIYKSALKNKDIAYLFINDILYYQRPLKAPKYNIGKCTYESRTFKKEDKKIREYIPAVAKSHPLFQEFRLWQWIKNLKIYEKLSSDNCTDFFLTNEQDFENLFEFLWNKKEIDHKGILEYLVKTKFPDLKPKQVKTKVKEYRWNYVYDHEKDESKTYPCGETYFLLKNKLDKIYNAQDDFLDKERLYNLWHIIYSVTDKKQYEKALAKFALKNHLDTKSFVNTFKRIPPFKNDYAIYSLKAIKKLLPLMRVGKYWNYDDIDPITKQKIQCIITGEENDTISTLVREKTNHFSNENDFKNLPLWLAGYIVYNSHNESSEIEKWKSPQDIDTFLKKFKQHALRNPIVEQVVTETLRVVRDIWSKKGQGKKDFFNEIHIELGKDLKNPVDKRRKLSSTNTKNESTNTRIKALLIELFTQGVENVKPNSPKHQEILKIFEEGALNSGIEIEEDIIKISNTDQPTKKQLELYILWLEHKYKSPYTGQSIPLSKLFTPNYEIEHIIPRSKYYDDNLSNKVICETEINRLKNNQLGYEFINNHEIREVTLEEGKTIRLLSPEQYWNFVTTYYAKNKAKRENLLLKELPVQMVEKQLNDTRYVSKYVMQLLSKIVRKEDGTDNGINSTNILSISGKMTRALKNDWDLNDVWNDLLLYRFERLNTITKTNLFTTYSEQKQKRMPIVPDQYAKGFHKKRLDHRHHALDAIVIACITRNHINYMNNQNIQGEKLKKNAIEKENYREILQKSRLDIRAQLCEKKYNDNDPTKYNWVFIKPWADFTENTKDILESIIPSFKQNLRIINKTVNYYEKYNENGKKVKVRQIKGDNWAIRKPLHKETISGKVHLSYKTPAKGKILTATRKVLDSSMDFKSIEKITDTGIQKILKNYLEYKKSPELAFSPEGIEELNATITKYNNGFHHKPIYKVRIYEEGVKFPLGNKGNKKSKYVEAEKGTNLFFAIYKDQENNRYFETIPFNDVLETLKKGMSAVPEKNQEENTLVFALSPQDLVFVPTLDEIENPDIVDFKNLTKDQTNRIYKMVSSSGKQCFFIKAEVATSIVNKMEFSTSNKMENSIEGIQIKSNCWKLKLDRLGTITRVIK

SEQ ID NO: 241 - protein, 1389 aa, Oenococcus kitaharae
MARDYSVGLDIGTSSVGWAAIDNKYHLIRAKSKNLIGVRLFDSAVTAEKRRGYRTTRRRLSRRHWRLRLLNDIFAGPLTDFGDENFLARLKYSWVHPQDQSNQAHFAAGLLFDSKEQDKDFYRKYPTIYHLRLALMNDDQKHDLREVYLAIHHLVKYRGHFLIEGDVKADSAFDVHTFADAIQRYAESNNSDENLLGKIDEKKLSAALTDKHGSKSQRAETAETAFDILDLQSKKQIQAILKSVVGNQANLMAIFGLDSSAISKDEQKNYKFSFDDADIDEKIADSEALLSDTEFEFLCDLKAAFDGLTLKMLLGDDKTVSAAMVRRFNEHQKDWEYIKSHIRNAKNAGNGLYEKSKKFDGINAAYLALQSDNEDDRKKAKKIFQDEISSADIPDDVKADFLKKIDDDQFLPIQRTKNNGTIPHQLHRNELEQIIEKQGIYYPFLKDTYQENSHELNKITALINFRVPYYVGPLVEEEQKIADDGKNIPDPTNHWMVRKSNDTITPWNLSQVVDLDKSGRRFIERLTGTDTYLIGEPTLPKNSLLYQKFDVLQELNNIRVSGRRLDIRAKQDAFEHLFKVQKTVSATNLKDFLVQAGYISEDTQIEGLADVNGKNFNNALTTYNYLVSVLGREFVENPSNEELLEEITELQTVFEDKKVLRRQLDQLDGLSDHNREKLSRKHYTGWGRISKKLLTTKIVQNADKIDNQTFDVPRMNQSIIDTLYNTKMNLMEIINNAEDDFGVRAWIDKQNTTDGDEQDVYSLIDELAGPKEIKRGIVQSFRILDDITKAVGYAPKRVYLEFARKTQESHLTNSRKNQLSTLLKNAGLSELVTQVSQYDAAALQNDRLYLYFLQQGKDMYSGEKLNLDNLSNYDIDHIIPQAYTKDNSLDNRVLVSNITNRRKSDSSNYLPALIDKMRPFWSVLSKQGLLSKHKFANLTRTRDFDDMEKERFIARSLVETRQIIKNVASLIDSHFGGETKAVAIRSSLTADMRRYVDIPKNRDINDYHHAFDALLFSTVGQYTENSGLMKKGQLSDSAGNQYNRYIKEWIHAARLNAQSQRVNPFGFVVGSMRNAAPGKLNPETGEITPEENADWSIADLDYLHKVMNFRKITVTRRLKDQKGQLYDESRYPSVLHDAKSKASINFDKHKPVDLYGGFSSAKPAYAALIKFKNKFRLVNVLRQWTYSDKNSEDYILEQIRGKYPKAEMVLSHIPYGQLVKKDGALVTISSATELHNFEQLWLPLADYKLINTLLKTKEDNLVDILHNRLDLPEMTIESAFYKAFDSILSFAFNRYALHQNALVKLQAHRDDFNALNYEDKQQTLERILDALHASPASSDLKKINLSSGFGRLFSPSHFTLADTDEFIFQSVTGLFSTQKTVAQLYQETK

SEQ ID NO: 242 - protein, 1425 aa, Prevotella micans
MIQKIFGLDLGTNSIGSSVRNLELGENLTEQLEFFSSDIFGSSVSKNSNGREYSLAGNRSAHRRSRGLNEARRRKLWATLDLLIEHGLCPMSPDSLMQWRTYDKQKGLYRQYPIEDKDFNAWIMLDFNGDGKPDYSSPYQLRRELVVRQFDFDQPIERYKLGRALYHIAQHRGFKSSKGETIADQEKNEKKPIAEEGADIANEMKASETKLSKGLVAYMQENHLKTVGEAFAKLEDERVRIRNNESYRAIRSQYQDEIKEIFTYQKKLSVESELYERLTSEKKGVGTIFYKRPLRSQRGNVGKCTLERNKPRCPIGRPEFEEFRAWTLINNIKIRETAGEPYKQLPIKLRQELLKDCFLSKVKADFKFEDIRKYIEKRLGLSFSNDDKTINYKDSVSIAACPVTVRMKKLLGENWANCRIDGEKRRQAHGKNNNNEHIVSYTEEDIWHVCYNAEDPEEVSNFARKALHWDENKIKELVRLWTSIPQGYAMLSLKAIRNINRMLLLGLKYSDAVLLAKLPDIVPVSDEDILAITKEFLQLEDKLNQEKQINNIVNSLIANYKSKLEENRFADHNYQYQLGEGDDEDINTQIKSHIGAKLWVQIGADEQTKIFQAVRSKYQDFFKSYKRKFVESPKLGELLVAFLTEKFPNVKSKQWERLYHPSQIAIYRPIPVDNDRSKLRLGNPNIGAIKNPTVMRVLNTLRRRVNQLLDDGVISPDETRVVVETARELNDANTKWALDRYNRIRRDENEKIRKILKELNPTTNSISEQDIDKARYIFEQCETDFYTDGKVPYYNKDIKKYKLWLEQGGQCLYTGQTINLTNLFNPNAFDMEHTIPKSISFDNSDQNLTLCESYYNRFIKKNNIPTDMPNYDKDVTINGKEYTAIKPRLQRWKERVDRLSRNVDFWKGQARRAQDKDRKDECIREKHLWDMELAYWKGKLERFTMTDVTDGFKNSQLVDTRVITRHAVLYLKSIFNHVEVQRGETTAEFRKILGLQSIDEKKDRSLHSHHAIDATMLTVIPSAAKRDRMLELFYKIEETKKALKNYNDNNKTGLNLELKGLEEKLDKEKKDCRVGRRVNDLDRFINENIIVSHHTKDQALTPAHRRLRKRGKIVGGKEHPRWQTGDSLRGEIHKASYYGAITQFAKDANGKVLMKDGQAQIDPTIYYVIRRELKYKRSTQDSGFTNWEDLEKVIVDTDLFGLMKGQFPEGTSFKDACEQGFYMIKKGKNGEGDVKTHRIRHVRCKAVKTALRIKEQTYKSSKDYKQFFYAAVGDLYVMCYYTDGKKRDFKIYSLYDISNHRKSGTEDIPKFITDKKGNHLPLDYKLRTGDMVLLYKDNPEELKDLDQVNLKRRLYKVNRFESEGLIILLTHHLSTTTERGCSIGKIENYQNLPTAIRCGIKTIKFLIMGKHRDFVIRNGNIEFKH

SEQ ID NO: 243 - protein, 1473 aa, Mucilaginibacter paludis
MKNILGLDLGTNSIGWALIEKDTDQKNGNILGTGSRIIPMSQDIKDEFGKGNSISQTADRTKFRSVRRLRERHLLRRERLHRVLNVLGFLPKHYADQIDFKKRLGKLVNETEPKLVYDNKNFIFKKSFEAMLSDFNQHQPLLLADGKKVPFDWTIYYLRKKALTEKIEKEELAWLILNFNQKRGYYQLRGEEEEENPNKMVAFHSLKIVEVIADESQKGKAETWYSLILENGWIYRRSSKTPLYDWKGKQRDFIVTTDLNDDGSIKTDKEGLEKRSFRAPVEDDWTLVKKKTEQEINRSHKTVGTYIYENLLQDPKQKIKGKLVRTIEREFYKDELKMILKNQQKFHPELNDEHLYINCVRELYRNNQAHQTILSKKDFVHLFIDDIIFYQRPLRSQKSSISNCTLEFRKYKNENGTDQTDYLKAIPKSHPLFQEFRLWQWIYNLGIYQKEDDTNVTDELIKNIDGYQDLFDFLNNKKEIRQDILIKFLVEQTGLKGKPLSSVVAKYRWNFVEDKIYPCNETGTQIRTRLAKVENTPEDFLTAETEIKLWHIIYSVNDKADYEKALKTFAEKHNLDTHSFVENFKKFPPFKSEYGSFSEKAIKKLLPLIRLGKYWSWENIDKKTQERIEKILTGEFDEAIKSRVRDKAIHLTEEDHFQGLQLWLASYVVYGRHSEADNLDKWHTVADLEDYLAEFRQHSLRNPIVEQVITETLRVVKDIWLQYGQGAKDFFSEIHIELAREMKNTGDERKRLTSLVTDNENTNLRIKVLLSELLNDGNVENVRPYSPMQQEALKIFEDGVLNSDIEIEDDILKISKMAQPTNTELKRYKLWLEQKYRSPYTGQIIPLNRLFTADYEIEHIIPQSRFFDDSFSNKIICESAVNQLKDKQLGLEFIKNHSGTIVKLGMGKTAKILDVESYNEFVKGNYTKNISKRNKLMLEEIPDKMIERQLNDTRYISKFIISALSNIVRSESNDDGFNSKNVLPGNGKITSRLKQDWGMNDIWNELILPRFERMNKITDSAVFTAWNENNQKFLPIVPLEFSKGFQKKRIDHRHHALDALVIAASTREHINLLNNEHAKSDKRFDLNRKLRKFEKVAYNDPKTGKRIEKEVPTIFLKPWETFTVDAKNSLESIIVSFKQNLRVINRATNYSESYNDENGALRLGKDGNPLKEKIKQSKGDSWAIRKPMHKDFVYGKVHLQNVKLPKDKFITAIRKSLDVTFDLKRIETITDTGIQKILKNYLHSKENKVELAFSPEGIEDMNQHIERYNDGKKHQPIHKVRVFEIGSRFSLGESGNKKTKFVEAAKGTNLFFAVYQDDNKGKRNYETIPLNIVIERQKLGLHSVPTEDAKGGKLLFHLSPNDMVYVPTSEELEDNLASVNIKRLNTAQRKRIYKVEKASGVECYFIRQDIAYLIKNYDAKTKIGELESQNKLQTTMTDDRLKITDVCVKLNIDRLGSIAETFLGNQYGASKKT

SEQ ID NO: 244 - protein, 1365 aa, Filifactor alocis
MTKEYYLGLDVGTNSVGWAVTDSQYNLCKFKKKDMWGIRLFESANTAKDRRLQRGNRRRLERKKQRIDLLQEIFSPEICKIDPTFFIRLNESRLHLEDKSNDFKYPLFIEKDYSDIEYYKEFPTIFHLRKHLIESEEKQDIRLIYLALHNIIKTRGHFLIDGDLQSAKQLRPILDTFLLSLQEEQNLSVSLSENQKDEYEEILKNRSIAKSEKVKKLKNLFEISDELEKEEKKAQSAVIENFCKFIVGNKGDVCKFLRVSKEELEIDSFSFSEGKYEDDIVKNLEEKVPEKVYLFEQMKAMYDWNILVDILETEEYISFAKVKQYEKHKTNLRLLRDIILKYCTKDEYNRMFNDEKEAGSYTAYVGKLKKNNKKYWIEKKRNPEEFYKSLGKLLDKIEPLKEDLEVLTMMIEECKNHTLLPIQKNKDNGVIPHQVHEVELKKILENAKKYYSFLTETDKDGYSVVQKIESIFRFRIPYYVGPLSTRHQEKGSNVWMVRKPGREDRIYPWNMEEIIDFEKSNENFITRMTNKCTYLIGEDVLPKHSLLYSKYMVLNELNNVKVRGKKLPTSLKQKVFEDLFENKSKVTGKNLLEYLQIQDKDIQIDDLSGFDKDFKTSLKSYLDFKKQIFGEEIEKESIQNMIEDIIKWITIYGNDKEMLKRVIRANYSNQLTEEQMKKITGFQYSGWGNFSKMFLKGISGSDVSTGETFDIITAMWETDNNLMQILSKKFTFMDNVEDFNSGKVGKIDKITYDSTVKEMFLSPENKRAVWQTIQVAEEIKKVMGCEPKKIFIEMARGGEKVKKRTKSRKAQLLELYAACEEDCRELIKEIEDRDERDFNSMKLFLYYTQFGKCMYSGDDIDINELIRGNSKWDRDHIYPQSKIKDDSIDNLVLVNKTYNAKKSNELLSEDIQKKMHSFWLSLLNKKLITKSKYDRLTRKGDFTDEELSGFIARQLVETRQSTKAIADIFKQIYSSEVVYVKSSLVSDFRKKPLNYLKSRRVNDYHHAKDAYLNIVVGNVYNKKFTSNPIQWMKKNRDTNYSLNKVFEHDVVINGEVIWEKCTYHEDTNTYDGGTLDRIRKIVERDNILYTEYAYCEKGELFNATIQNKNGNSTVSLKKGLDVKKYGGYFSANTSYFSLIEFEDKKGDRARHIIGVPIYIANMLEHSPSAFLEYCEQKGYQNVRILVEKIKKNSLLIINGYPLRIRGENEVDTSFKRAIQLKLDQKNYELVRNIEKFLEKYVEKKGNYPIDENRDHITHEKMNQLYEVLLSKMKKFNKKGMADPSDRIEKSKPKFIKLEDLIDKINVINKMLNLLRCDNDTKADLSLIELPKNAGSFVVKKNTIGKSKIILVNQSVTGLYENRREL

SEQ ID NO: 245 - protein, 1130 aa, Streptococcus macedonicus
MTNGKILGLDIGIASVGVGIIEAKTGKVVHANSRLFSAANAENNAERRGFRGSRRLNRRKKHRVKRVRDLFEKYGIVTDFRNLNLNPYELRVKGLTEQLTNEELFAALRTISKRRGISYLDDAEDDSTGSTDYAKSIDENRRLLKTKTPGQIQLERLEKYGQLRGNFTVYDENGEAHRLINVFSTSDYEKEARKILETQADYNKKITAEFIDDYVEILTQKRKYYHGPGNEKSRTDYGRFRTDGTTLENIFGILIGKCNFYPDEYRASKASYTAQEYNFLNDLNNLKVPTETGKLSTEQKESLVEFAKNTAILGPAKLLKEIAKILDCKVDEIKGYREDDKGKPDLHTFEPYRKLKFNLDSVNIDYLSREVLDKLADILTLNTEREGIEDAIKRNLPNQFTEEQISEIINVRKSQSTAFNKGWHSFSAKLMNELIPELYATSDEQMTILTRLEKFKVKKKSSKNIKTIDEKEITDEIYNPVVAKSVRQTIKIINAAVKKYGDFDKIVIEMPRDKNADDEKKFINKRNKENKKEKDDALKRAAYLYNGTDKLPDEVFHGNKQLETKIRLWYQQGERCLYSGKPIPIQELVHNSNNFEIDHILPLSLSFDDSLANKVLVYSWTNQEKGQKTPYQVIDSMDAAWSFREMKEYVLKQKGLGKKKRDYLLTTENIDKIEVKKKFIERNLVDTRYASRVVLNSLQSALRELGKDTKVSVVRGQFTSQLRRKWKIDKSRETYHHHAVDALIIAASSQLKLWEKQDNPMFVDYGNNQVVDKQTGEILSVSDNEYKELVFQPPYQGFVNTISSKGFEDEILFSYQVDSKYNRKVSDATIYSTRKAKIGKDKKEETYVLGKIKDIYSQNGFDTFVKKYNKDKTQFLMYQKDPLTWENVIEVILGDYPTTKKSEDGKNDVKCNPFEEYRRENGLICKYSKKGKGTPIKSLKYYDKKLGNCIDITPEESRNKVILQSINPWRADVYFNPETLKYELMGLKYSDLSFEKGTGNYHISQEKYDAIKEKEGIGKKSEFKFTLYRNDLILIKDIASGEQEIYRFLSRTMPNVNHYVELKPYDKEKFDNVQELVEALGEADKVGRCIKSLNKPNISIYKVRTDVLGNKYFVKKEGDKPKLDFKNNKK

SEQ ID NO: 246 - protein, 1367 aa, Streptococcus pyogenes
MDKKYSIGLDIGTNSVGWAVITDDYKVPSKKFKVLGNTDRHSIKKNLIGALLFGSGETAEATRLKRTARRRYTRRKNRICYLQEIFSNEMAKVDDSFFHRLEESFLVEEDKKHERHPIFGNIVDEVAYHEKYPTIYHLRKKLADSTDKADLRLIYLALAHMIKFRGHFLIEGDLNPDNSDVDKLFIQLVQIYNQLFEENPINASRVDAKAILSARLSKSRRLENLIAQLPGEKRNGLFGNLIALSLGLTPNFKSNFDLAEDAKLQLSKDTYDDDLDNLLAQIGDQYADLFLAAKNLSDAILLSDILRVNSEITKAPLSASMIKRYDEHHQDLTLLKALVRQQLPEKYKEIFFDQSKNGYAGYIDGGASQEEFYKFIKPILEKMDGTEELLVKLNREDLLRKQRTFDNGSIPHQIHLGELHAILRRQEDFYPFLKDNREKIEKILTFRIPYYVGPLARGNSRFAWMTRKSEETITPWNFEEVVDKGASAQSFIERMTNFDKNLPNEKVLPKHSLLYEYFTVYNELTKVKYVTEGMRKPAFLSGEQKKAIVDLLFKTNRKVTVKQLKEDYFKKIECFDSVEISGVEDRFNASLGAYHDLLKIIKDKDFLDNEENEDILEDIVLTLTLFEDRGMIEERLKTYAHLFDDKVMKQLKRRRYTGWGRLSRKLINGIRDKQSGKTILDFLKSDGFANRNFMQLIHDDSLTFKEDIQKAQVSGQGHSLHEQIANLAGSPAIKKGILQTVKIVDELVKVMGHKPENIVIEMARENQTTQKGQKNSRERMKRIEEGIKELGSQILKEHPVENTQLQNEKLYLYYLQNGRDMYVDQELDINRLSDYDVDHIVPQSFIKDDSIDNKVLTRSDKNRGKSDNVPSEEVVKKMKNYWRQLLNAKLITQRKFDNLTKAERGGLSELDKAGFIKRQLVETRQITKHVAQILDSRMNTKYDENDKLIREVKVITLKSKLVSDFRKDFQFYKVREINNYHHAHDAYLNAVVGTALIKKYPKLESEFVYGDYKVYDVRKMIAKSEQEIGKATAKYFFYSNIMNFFKTEITLANGEIRKRPLIETNGETGEIVWDKGRDFATVRKVLSMPQVNIVKKTEVQTGGFSKESILPKRNSDKLIARKKDWDPKKYGGFDSPTVAYSVLVVAKVEKGKSKKLKSVKELLGITIMERSSFEKNPIDFLEAKGYKEVKKDLIIKLPKYSLFELENGRKRMLASAGELQKGNELALPSKYVNFLYLASHYEKLKGSPEDNEQKQLFVEQHKHYLDEIIEQISEFSKRVILADANLDKVLSAYNKHRDKPIREQAENIIHLFTLTNLGAPAAFKYFDTTIDRKRYTSTKEVLDATLIHQSITGLYETRIDLSQLGGD

SEQ ID NO: 247 - protein, 1233 aa, Mycoplasma canis
MEKKRKVTLGFDLGIASVGWAIVDSETNQVYKLGSRLFDAPDTNLERRTQRGTRRLLRRRKYRNQKFYNLVKRTEVFGLSSREAIENRFRELSIKYPNIIELKTKALSQEVCPDEIAWILHDYLKNRGYFYDEKETKEDFDQQTVESMPSYKLNEFYKKYGYFKGALSQPTESEMKDNKDLKEAFFFDFSNKEWLKEINYFFNVQKNILSETFIEEFKKIFSFTRDISKGPGSDNMPSPYGIFGEFGDNGQGGRYEHIWDKNIGKCSIFTNEQRAPKYLPSALIFNFLNELANIRLYSTDKKNIQPLWKLSSVDKLNILLNLFNLPISEKKKKLTSTNINDIVKKESIKSIMISVEDIDMIKDEWAGKEPNVYGVGLSGLNIEESAKENKFKFQDLKILNVLINLLDNVGIKFEFKDRNDIIKNLELLDNLYLFLIYQKESNNKDSSIDLFIAKNESLNIENLKLKLKEFLLGAGNEFENHNSKTHSLSKKAIDEILPKLLDNNEGWNLEAIKNYDEEIKSQIEDNSSLMAKQDKKYLNDNFLKDAILPPNVKVTFQQAILIFNKIIQKFSKDFEIDKVVIELAREMTQDQENDALKGIAKAQKSKKSLVEERLEANNIDKSVFNDKYEKLIYKIFLWISQDFKDPYTGAQISVNEIVNNKVEIDHIIPYSLCFDDSSANKVLVHKQSNQEKSNSLPYEYIKQGHSGWNWDEFTKYVKRVFVNNVDSILSKKERLKKSENLLTASYDGYDKLGFLARNLNDTRYATILFRDQLNNYAEHHLIDNKKMFKVIAMNGAVTSFIRKNMSYDNKLRLKDRSDFSHHAYDAAIIALFSNKTKTLYNLIDPSLNGIISKRSEGYWVIEDRYTGEIKELKKEDWTSIKNNVQARKIAKEIEEYLIDLDDEVFFSRKTKRKTNRQLYNETIYGIATKTDEDGITNYYKKEKFSILDDKDIYLRLLREREKFVINQSNPEVIDQIIEIIESYGKENNIPSRDEAINIKYTKNKINYNLYLKQYMRSLTKSLDQFSEEFINQMIANKTFVLYNPTKNTTRKIKFLRLVNDVKINDIRKNQVINKFNGKNNEPKAFYENINSLGAIVFKNSANNFKTLSINTQIAIFGDKNWDIEDFKTYNMEKIEKYKEIYGIDKTYNFHSFIFPGTILLDKQNKEFYYISSIQTVRDIIEIKFLNKIEFKDENKNQDTSKTPKRLMFGIKSIMNNYEQVDISPFGINKKIFE

SEQ ID NO: 248 - protein, 1375 aa, Lactobacillus johnsonii
MTKIKDDYIVGLDIGTDSCGWVAMNSNNDILKLQGKTAIGSRLFEGGKSAAERRLFRTTHRRIKRRRWRLKLLEEFFDPYMAEVDPYFFARLKESGLSPLDKRKTVSSIVFPTSAEDKKFYDDYPTIYHLRYKLMTEDEKFDLREVYLAIHHIIKYRGNFLYNTSVKDFKASKIDVKSSIEKLNELYENLGLDLNVEFNISNTAEIEKVLKDKQIFKRDKVKKIAELFAIKTDNKEQSKRIKDISKQVANAVLGYKTRFDTIALKEISKDELSDWNFKLSDIDADSKFEALMGNLDENEQAILLTIKELFNEVTLNGIVEDGNTLSESMINKYNDHRDDLKLLKEVIENHIDRKKAKELALAYDLYVNNRHGQLLQAKKKLGKIKPRSKEDFYKVVNKNLDDSRASKEIKKKIELDSFMPKQRTNANGVIPYQLQQLELDKIIENQSKYYPFLKEINPVSSHLKEAPYKLDELIRFRVPYYVGPLISPNESTKDIQTKKNQNFAWMIRKEEGRITPWNFDQKVDRIESANKFIKRMTTKDTYLFGEDVLPANSLLYQKFTVLNELNNIRINGKRISVDLKQEIYENLFKKHTTVTVKKLENYLKENHNLVKVEIKGLADEKKFNSGLTTYNRFKNLNIFDNQIDDLKYRNDFEKIIEWSTIFEDKSIYKEKLRSIDWLNEKQINALSNIRLQGWGRLSKKLLAQLHDHNGQTIIEQLWDSQNNFMQIVTQADFKDAIAKANQNLLVATSVEDILNNAYTSPANKKAIRQVIKVVDDIVKAASGKVPKQIAIEFTRDADENPKRSQTRGSKLQKVYKDLSTELASKTIAEELNEAIKDKKLVQDKYYLYFMQLGRDAYTGEPINIDEIQKYDIDHILPQSFIKDDALDNRVLVSRAVNNGKSDNVPVKLFGNEMAANLGMTIRKMWEEWKNIGLISKTKYNNLLTDPDHINKYKSAGFIRRQLVETSQIIKLVSTILQSRYPNTEIITVKAKYNHYLREKFDLYKSREVNDYHHAIDAYLSAICGNLLYQNYPNLRPFFVYGQYKKFSSDPDKEKAIFNKTRKFSFISQLLKNKSENSKEIAKKLKRAYQFKYMLVSRETETRDQEMFKMTVYPRFSHDTVKAPRNLIPKKMGMSPDIYGGYTNNSDAYMVIVRIDKKKGTEYKILGIPTRELVNLKKAEKEDHYKSYLKEILTPRILYNKNGKRDKKITSFEIVKSKIPYKQVIQDGDKKFMLGSSTYVYNAKQLTLSTESMKAITNNFDKDSDENDALIKAYDEILDKVDKYLPLFDINKFREKLHSGREKFIKLSLEDKKDTILKVLEGLHDNAVMTKIPTIGLSTPLGFMQFPNGVILSENAKLIYQSPTGLFKKSVKISDL

SEQ ID NO: 249 - protein, 1053 aa, Staphylococcus aureus
MKRNYILGLDIGITSVGYGIIDYETRDVIDAGVRLFKEANVENNEGRRSKRGARRLKRRRRHRIQRVKKLLFDYNLLTDHSELSGINPYEARVKGLSQKLSEEEFSAALLHLAKRRGVHNVNEVEEDTGNELSTKEQISRNSKALEEKYVAELQLERLKKDGEVRGSINRFKTSDYVKEAKQLLKVQKAYHQLDQSFIDTYIDLLETRRTYYEGPGEGSPFGWKDIKEWYEMLMGHCTYFPEELRSVKYAYNADLYNALNDLNNLVITRDENEKLEYYEKFQIIENVFKQKKKPTLKQIAKEILVNEEDIKGYRVTSTGKPEFTNLKVYHDIKDITARKEIIENAELLDQIAKILTIYQSSEDIQEELTNLNSELTQEEIEQISNLKGYTGTHNLSLKAINLILDELWHTNDNQIAIFNRLKLVPKKVDLSQQKEIPTTLVDDFILSPVVKRSFIQSIKVINAIIKKYGLPNDIIIELAREKNSKDAQKMINEMQKRNRQTNERIEEIIRTTGKENAKYLIEKIKLHDMQEGKCLYSLEAIPLEDLLNNPFNYEVDHIIPRSVSFDNSFNNKVLVKQEENSKKGNRTPFQYLSSSDSKISYETFKKHILNLAKGKGRISKTKKEYLLEERDINRFSVQKDFINRNLVDTRYATRGLMNLLRSYFRVNNLDVKVKSINGGFTSFLRRKWKFKKERNKGYKHHAEDALIIANADFIFKEWKKLDKAKKVMENQMFEEKQAESMPEIETEQEYKEIFITPHQIKHIKDFKDYKYSHRVDKKPNRELINDTLYSTRKDDKGNTLIVNNLNGLYDKDNDKLKKLINKSPEKLLMYHHDPQTYQKLKLIMEQYGDEKNPLYKYYEETGNYLTKYSKKDNGPVIKKIKYYGNKLNAHLDITDDYPNSRNKVVKLSLKPYRFDVYLDNGVYKFVTVKNLDVIKKENYYEVNSKCYEEAKKLKKISNQAEFIASFYNNDLIKINGELYRVIGVNNDLLNRIEVNMIDITYREYLENMNDKRPPRIIKTIASKTQSIKKYSTDILGNLYEVKSKKHPQIIKKG

SEQ ID NO: 250 - protein, 1063 aa, Simonsiella muelleri
MEKFHYVLGLDLGIASVGWAAIEIDKETETSIGLLDCGVRTFERAEVPKTGDSLAKARREARSTRRLIRRRSHRLLRLKRLLKREIFRQPETFKDLPINAWQLRVKGLDSRLNEYEWAAVLLHLVKHRGYLSQRKSEMSETDSKSEMGRLLAGVAENHQLLQQEQYRTPAELALKKFVKHFRNKGGDYAHTFNRLDLQAELHLLFQKQRELGNPFTSPELERQVDDLLMTQRSALQGDAILKMLGHCGFEPEQFKAAKNTFSAERFIWLTKLNNLRIQDQGKERALTADERTKLLDEPYKKSKLTYAQVRKLLSLPQTAIFKGLRYDLEHDKKAENSTLMEMKSYHNIRQTLEKSGLKTEWQSIATQPEILDAIGTAFSIYKTDEDISHELKTCRLPENVLNELLKNINFDGFIQLSLTALRKILPLMEQGYRYDEACTQIYGNHHSGSLQQESKQFLPHIPIDDVRNPVVFRTLTQARKVVNAIIRRYGSPARVHIEMARELGKSKSDRDRIEKQQQKNKKERENAVAKFKEDFPDFVGEPRGKDILKMRLYEQQHGKCLYSGHDIDINRLNEKGYVEIDHALPFSRTWDDSQNNKVLVLGSENQNKRNQTPDEYLDGANNSQRWLEFQARVQTCHFSYGKKQRIQLAKLDDETEKGFLERNLNDTRYIARFMCQFVQENLYLTGKGKRLVFASNGGMTATLRNLWGLRKVREDNDRHHALDAIVVACSTASMQQKITKAFQRHESIEYVDTETGEVKFRIPQPWDFFRQEVMIRVFSDQPCEDLVEKLSARPEALHDNVTPLFVSRAPNRKMSGQGHLETIKSAKRLSEENSMVKKPLTTLKLKDIPEIVGYPSREPQLYAALKTRLETHDDDPIKAFAKPFYKPNKNGELGALVRSVRVKGVQNTGVMVHDGKGIADNATMVRVDVYTKAGKNYLVPVYVWQVAQGILPNRAVTSGKSEADWDLIDESFEFKFSLSRGDLVEMISNKGRIFGYYNGLDRANGSIGIREHDLEKSKGKDGVHRVGVKTATAFNKYHVDPLGKEIHRCSSEPRPTLKIKSKK

SEQ ID NO: 251 - protein, 1509 aa, Psychroflexus torquis
MKRILGLDLGTNSIGWSLIEHDFKNKQGQIEGLGVRIIPMSQEILGKFDAGQSISQTADRTKYRGVRRLYQRDNLRRERLHRVLKILDFLPKHYSESIDFQDKVGQFKPKQEVKLNYRKNEKNKHEFVFMNSFIEMVSEFKNAQPELFYNKGNGEETKIPYDWTLYYLRKKALTQQITKEELAWLILNFNQKRGYYQLRGEDIDEDKNKKYMQLKVNNLIDSGAKVKGKVLYNVIFDNGWKYEKQIVNKDEWEGRTKEFIITTKTLKNGNIKRTYKAVDSEIDWAAIKAKTEQDINKANKTVGEYIYESLLDNPSQKIRGKLVKTIERKFYKEEFEKLLSKQIELQPELFNESLYKACIKELYPRNENHQSNNKKQGFEYLFTEDIIFYQRPLKSQKSNISGCQFEHKIYKQKNKKTGKLELIKEPIKTISRSHPLFQEFRIWQWLQNLKIYNKEKIENGKLEDVTTQLLPNNEAYVTLFDFLNTKKELEQKQFIEYFVKKKLIDKKEKEHFRWNFVEDKKYPFSETRAQFLSRLAKVKGIKNTEDFLNKNTQVGSKENSPFIKRIEQLWHIIYSVSDLKEYEKALEKFAEKHNLEKDSFLKNFKKFPPFVSDYASYSKKAISKLLPIMRMGKYWSESAVPTQVKERSLSIMERVKVLPLKEGYSDKDLADLLSRVSDDDIPKQLIKSFISFKDKNPLKGLNTYQANYLVYGRHSETGDIQHWKTPEDIDRYLNNFKQHSLRNPIVEQVVMETLRVVRDIWEHYGNNEKDFFKEIHVELGREMKSPAGKREKLSQRNTENENTNHRIREVLKELMNDASVEGGVRDYSPSQQEILKLYEEGIYQNPNTNYLKVDEDEILKIRKKNNPTQKEIQRYKLWLEQGYISPYTGKIIPLTKLFTHEYQIEHIIPQSRYYDNSLGNKIICESEVNEDKDNKTAYEYLKVEKGSIVFGHKLLNLDEYEAHVNKYFKKNKTKLKNLLSEDIPEGFINRQLNDSRYISKLVKGLLSNIVRENGEQEATSKNLIPVTGVVTSKLKQDWGLNDKWNEIIAPRFKRLNKLTNSNDFGFWDNDINAFRIQVPDSLIKGFSKKRIDHRHHALDALVVACTSRNHTHYLSALNAENKNYSLRDKLVIKNENGDYTKTFQIPWQGFTIEAKNNLEKTVVSFKKNLRVINKTNNKFWSYKDENGNLNLGKDGKPKKKLRKQTKGYNWAIRKPLHKETVSGIYNINAPKNKIATSVRTLLTEIKNEKHLAKITDLRIRETILPNHLKHYLNNKGEANFSEAFSQGGIEDLNKKITTLNEGKKHQPIYRVKIFEVGSKFSISEDENSAKSKKYVEAAKGTNLFFAIYLDEENKKRNYETIPLNEVITHQKQVAGFPKSERLSVQPDSQKGTFLFTLSPNDLVYVPNNEELENRDLFNLGNLNVEQISRIYKFTDSSDKTCNFIPFQVSKLIFNLKKKEQKKLDVDFIIQNEFGLGSPQSKNQKSIDDVMIKEKCIKLKIDRLGNISKA

SEQ ID NO: 252 - protein, 1112 aa, Staphylococcus simulans
MLVGLKFKQSILFENMENAEDIKESATGSDAISLSDDYYENLSEFLTDEQLNFIESANTFFMGIMLDRILKGATSISAAKVRDYKIFKSQLKLIKDIVYQNKYDKYHEFFVTSKEDMRAYQENPDAKNFGKLSKFDQYLIHSKDQYAKLMKDLKGLVPKEYTEVLNLIDEQKFLVVQNTTDNASIPYQNNVFEAENILRNQQKYYPEITEEMIGKVINLISFRIPYYVGPLTNKNGQSDFAWMIRKSDEQTLPWNFDKVIDKSKSAEKFIRRMTSKCTYLLEEDVLPKHSLLYQEMEVLNELNNVQLRGENEPKHRIHRLDPKVKQFIYHNLFQKKKNVTHKDLITLLQNSEHRNTLNKTSGQKLKVFGTQNDSKFASKLSTYNDMKAILGSVENKRQMIEELVLWITIFEDKAILKQKIGEKYPNITEKQLNQIVKLNYSGWGRLSEKLLTKEVNGRSLIDLMYSTENNFMEIITDKTLGFDCFIKNSNKVKNAKISYKDVAELRTSPALKKGIWNAIKMVREISNLFGAPEKIIIEFATEDQAKGKRQKSRSELWDDLVKKNNLKRNKEFEGLFEELKAYPDLDFSNPKLWLYIHQNGKCMYTKKPIDLERLMSDTNNQLYEIDHILPRTFVKDDSINNKVLVIQSANQKKSGDKMPLEIFDNHVLVPFWKMLYENDLISSSKLSKLMKKEFNDLDKEGFIQRQLVETRQIISHVSDFLTEEYPSTTVVPMKANVVSELRRKFDIPKIRQLNDWHHAVDAYLNGFVYQAARVFYPKVNLFEFNFKWEKVREKWRQLGEFTENNKKREFFLFKRMENYVNEYGEGMISKLIFDLDNFKFNYSRKVESTESAFYKQSAFSPKNTTAQYDSDKNKTAIYKEMKNKRGIVVSYTYVKKDQELIGYGVFNETVFEYVNNADVDMNTRALKIVRKAFPKLDIKKAQYLFSINKGDALLVNGHPFLFVSAYERINGKQLEFDIAMQRKIKQALSPYNNMTEQEKVEFYNQFAEKVIEEFRNSIGLQSRDRKVNLIKNLFNNTEKSNDSMTQSILEVLKMTKVSAERSKELKIRWNGQTPNTFIDTKNNAEIQYKSITGLKTTKPKSIFKLAESKNEL

SEQ ID NO: 253 - protein, 1274 aa, Mycoplasma gallisept
MNINMNNSIKSKPEVTIGLDLGVGSVGWAIVDNETNIIHHLGSRLFSQAKTAEDRRSFRGVRRLIRRRKYKLKRFVNLIWKYNSYFGFKNKEDILNNYQEQQKLHNTVLNLKLEALNAKIDPKALSWILHDYLKNRGHFYEDNRDFNVYPTEELANYFDEFGYYKGIIDSKNDDDDKLEEGLTKYKFSNQHWLEEVKKVLSNQTGLPEKFKEEYESLFSYVRNYSEGPGSINSVSPYGIYHLDEKEGKVVQKYNNIWDKTIGKCSIFPDEYRAPKNSPIAMIFNEINELSTIRSYSIYLTGWFINQEFKKAYLNKLLDLLIKTNSEKPIDARQFKKLREETIAESIGKETLKDVESEEKLEKDDHKWKLKGLKLNTNGKIQYNDLSSLAKFVHKLKQHLKLDFLLEDQYTPLDKINFLQSLYVYLGKHLRYSNRVDSANLKEFSDSSRLFERVLQEQKDGLFKLFEQTDKDDEKILTQTHSLSTKAMLLAITRMTNLDNDEDNQKNNDKGWNFEAIKNFDQKFIDITKTNNNLSLKQDKRYLDDQFINDAILSPGVKRILREATKVFNAILKQFSEEYDVTKVVIELARELSEEKELENTKNYKKLIKKNGDKISEGLKALGIAEDKIEEILKSPTKSYKVLLWLQQDHIDPYSQKEIAFDDILTKTEKTEIDHIIPYSISFDDSSSNKLLVLAESNQAKSNQTPYEFINSGKAEITWEVYEAYCHKFKNGDSSLLDSTQRSKKFAKMMKTDTSSKYDIGFLARNLNDTRYATIVFRDALKDYANNHLVEDKPMFKVVCINGGVTSFLRKNFDPKSWYAKKDRDKNIHHAVDASIISIFSNETKTLFNQLTKFADYKLFKNTDGSWKKIDPKTGVVSEVTDENWKQIRVRNQVSEIAKVIDKYIQDSNIERKARYSRKIENKTNISLFNDTVYSAKKVGYEDQIKRKNLKTLDIHESAEENKNSKVKKQFVYRKLVNVSLLNNDKLADLFAEKEDILMYRANPWVINLAEQIFNEYTENKKIKSQNVFEKYMLDLTKEFPEKFSEAFVKSMIRNKTAIIYNVEKDVVHRIKRLKILSSELKENKWSNVIIRSKNESGTKLSYQDTINSIALMIMRSIDPTAKKQYIRVPLNTLNLHLGDQDFDLHNIDAYLKKPKFVKYLKANEIGDEYKPWRVLTSGTLLIHKKDKKLMYISSFQNLNDLIEIKNLIETEYKENVDSDPKKKKKASQILRSLSVILNDYILLDAKYNFDILGLSKNKIDEILNSKLDLDKIAK

SEQ ID NO: 254 - protein, 1122 aa, Artificial Sequence; identical to SEQ ID NO: 23
  Synthetic Sequence

SEQ ID NO: 255 - protein, 1236 aa, Artificial Sequence; identical to SEQ ID NO: 21
  Synthetic Sequence

SEQ ID NO: 256 - protein, 1059 aa, Artificial Sequence; identical to SEQ ID NO: 15
  Synthetic Sequence

SEQ ID NO: 257 - protein, 1166 aa, Artificial Sequence; identical to SEQ ID NO: 39
  Synthetic Sequence

SEQ ID NO: 258 - protein, 1149 aa, Artificial Sequence; identical to SEQ ID NO: 37
  Synthetic Sequence

SEQ ID NO: 259 - protein, 1314 aa, Artificial Sequence; identical to SEQ ID NO: 27
  Synthetic Sequence

SEQ ID NO: 260 - protein, 1064 aa, Artificial Sequence; identical to SEQ ID NO: 38
  Synthetic Sequence

SEQ ID NO: 261 - protein, 1401 aa, Artificial Sequence
  Synthetic Sequence
MDKKYSIGLDIGTNSVGWAVITDEYKVPSKKFKVLGNTDRHSIKKNLIGALLFDSGETAEATRLKRTARRRYTRRKNRICYLQEIFSNEMAKVDDSFFHRLEESFLVEEDKKHERHPIFGNIVDEVAYHEKYPTIYHLRKKLVDSTDKADLRLIYLALAHMIKFRGHFLIEGDLNPDNSDVDKLFIQLVQTYNQLFEENPINASGVDAKAILSARLSKSRRLENLIAQLPGEKKNGLFGNLIALSLGLTPNFKSNFDLAEDAKLQLSKDTYDDDLDNLLAQIGDQYADLFLAAKNLSDAILLSDILRVNTEITKAPLSASMIKRYDEHHQDLTLLKALVRQQLPEKYKEIFFDQSKNGYAGYIDGGASQEEFYKFIKPILEKMDGTEELLVKLNREDLLRKQRTFDNGSIPHQIHLGELHAILRRQEDFYPFLKDNREKIEKILTFRIPYYVGPLARGNSRFAWMTRKSEETITPWNFEEVVDKGASAQSFIERMTNFDKNLPNEKVLPKHSLLYEYFTVYNELTKVKYVTEGMRKPAFLSGEQKKAIVDLLFKTNRKVTVKQLKEDYFKKIECFDSVEISGVEDRFNASLGTYHDLLKIIKDKDFLDNEENEDILEDIVLTLTLFEDREMIEERLKTYAHLFDDKVMKQLKRRRYTGWGRLSRKLINGIRDKQSGKTILDFLKSDGFANRNFMQLIHDDSLTFKEDIQKAQVSGQGDSLHEHIANLAGSPAIKKGILQTVKVVDELVKVMGRHKPENIVIEMARENQTTQKGQKNSRERMKRIEEGIKELGSQILKEHPVENTQLQNEKLYLYYLQNGRDMYVDQELDINRLSDYDVDHIVPQSFLKDDSIDNKVLTRSDKNRGKSDNVPSEEVVKKMKNYWRQLLNAKLITQRKFDNLTKAERGGLSELDKAGFIKRQLVETRQITKHVAQILDSRMNTKYDENDKLIREVKVITLKSKLVSDFRKDFQFYKVREINNYHHAHDAYLNAVVGTALIKKYPKLESEFVYGDYKVYDVRKMIAKSEQEIGKATAKYFFYSNIMNFFKTEITLANGEIRKRPLIETNGETGEIVWDKGRDFATVRKVLSMPQVNIVKKTEVQTGGFSKESILPKRNSDKLIARKKDWDPKKYGGFDSPTVAYSVLVVAKVEKGKSKKLKSVKELLGITIMERSSFEKNPIDFLEAKGYKEVKKDLIIKLPKYSLFELENGRKRMLASAGELQKGNELALPSKYVNFLYLASHYEKLKGSPEDNEQKQLFVEQHKHYLDEIIEQISEFSKRVILADANLDKVLSAYNKHRDKPIREQAENIIHLFTLTNLGAPAAFKYFDTTIDRKRYTSTKEVLDATLIHQSITGLYETRIDLSQLGGDAYPYDVPDYASLGSGSPKKKRKVEDPKKKRKVD

SEQ ID NO: 262 - protein, 1368 aa, Artificial Sequence
  Synthetic Sequence
MDKKYSIGLAIGTNSVGWAVITDDYKVPSKKLKGLGNTDRHGIKKNLIGALLFDSGETAEATRLKRTARRRYTRRKNRICYLQEIFSNEMAKVDDSFFHRLEESFLVEEDKKHERHPIFGNIVDEVAYHEKYPTIYHLRKKLADSTDKVDLRLIYLALAHMIKFRGHFLIEGDLNPDNSDVDKLFIQLVQTYNQLFEENPINASRVDAKAILSARLSKSRRLENLIAQLPGEKKNGLFGNLIALSLGLTPNFKSNFDLAEDAKLQLSKDTYDDDLDNLLAQIGDQYADLFLAAKNLSDATLLSDILRVNSEITKAPLSASMIKRYDEHHQDLTLLKALVRQQLPEKYKEIFFDQSKNGYAGYIDGGASQEEFYKFIKPILEKMDGTEELLAKLNREDLLRKQRTFDNGSIPYQIHLGELHAILRRQEDFYPFLKDNREKIEKILTFRIPYYVGPLARGNSRFAWMTRKSEETITPWNFEEVVDKGASAQSFIERMTNFDKNLPNEKVLPKHSLLYEYFTVYNELTKVKYVTEGMRKPAFLSGEQKKAIVDLLFKTNRKVTVKQLKEDYFKKIECFDSVEISGVEDRFNASLGTYHDLLKIIKDKDFLDNEENEDILEDIVLTLTLFEDREMIEERLKTYAHLFDDKVMKQLKRRRYTGWGRLSRKLINGIRDKQSGKTILDFLKSDGFANRNFMQLIHDDSLTFKEDIQKAQVSGQGDSLHEHIANLAGSPAIKKGILQTVKVVDELVKVMGRHKPENIVIEMARENQTTQKGQKNSRERMKRIEEGIKELGSDILKEYPVENTQLQNEKLYLYYLQNGRDMYVDQELDINRLSDYDVDHIVPQSFLKDDSIDNKVLTRSDKNRGKSDNVPSEEVVKKMKNYWRQLLNAKLITQRKFDNLTKAERGGLSELDKVGFIKRQLVETRQITKHVAQILDSRMNTKYDENDKLIREVRVITLKSKLVSDFRKDFQFYKVREINNYHHAHDAYLNAVVGTALIKKYPKLESEFVYGDYKVYDVRKMIAKSEQEIGKATAKYFFYSNIMNFFKTEITLANGEIRKRPLIETNGETGEIVWDKGRDFATVRKVLSMPQVNIVKKTEVQTGGFSKESILPKRNSDKLIARKKDWDPKKYGGFDSPTVAYSVLVVAKVEKGKSKKLKSVKELLGITIMERSSFEKDPIDFLEAKGYKEVRKDLIIKLPKYSLFELENGRKRMLASAGELQKGNELALPSKYVNFLYLASHYEKLKGSPEDNEQKQLFVEQHKHYLDEIIEQISEFSKRVILADANLDKVLSAYNKHRDKPIREQAENIIHLFTLTNLGAPAAFKYFDTTIDRKRYTSTKEVLDATLIHQSITGLYETRIDLSQLGGD

SEQ ID NO: 263 - protein, 1368 aa, Artificial Sequence
  Synthetic Sequence
MDKKYSIGLDIGTNSVGWAVITDDYKVPSKKLKGLGNTDRHGIKKNLIGALLFDSGETAEATRLKRTARRRYTRRKNRICYLQEIFSNEMAKVDDSFFHRLEESFLVEEDKKHERHPIFGNIVDEVAYHEKYPTIYHLRKKLADSTDKVDLRLIYLALAHMIKFRGHFLIEGDLNPDNSDVDKLFIQLVQTYNQLFEENPINASRVDAKAILSARLSKSRRLENLIAQLPGEKKNGLFGNLIALSLGLTPNFKSNFDLAEDAKLQLSKDTYDDDLDNLLAQIGDQYADLFLAAKNLSDATLLSDILRVNSEITKAPLSASMIKRYDEHHQDLTLLKALVRQQLPEKYKEIFFDQSKNGYAGYIDGGASQEEFYKFIKPILEKMDGTEELLAKLNREDLLRKQRTFDNGSIPYQIHLGELHAILRRQEDFYPFLKDNREKIEKILTFRIPYYVGPLARGNSRFAWMTRKSEETITPWNFEEVVDKGASAQSFIERMTNFDKNLPNEKVLPKHSLLYEYFTVYNELTKVKYVTEGMRKPAFLSGEQKKAIVDLLFKTNRKVTVKQLKEDYFKKIECFDSVEISGVEDRFNASLGTYHDLLKIIKDKDFLDNEENEDILEDIVLTLTLFEDREMIEERLKTYAHLFDDKVMKQLKRRRYTGWGRLSRKLINGIRDKQSGKTILDFLKSDGFANRNFMQLIHDDSLTFKEDIQKAQVSGQGDSLHEHIANLAGSPAIKKGILQTVKVVDELVKVMGRHKPENIVIEMARENQTTQKGQKNSRERMKRIEEGIKELGSDILKEYPVENTQLQNEKLYLYYLQNGRDMYVDQELDINRLSDYDVDAIVPQSFLKDDSIDNKVLTRSDKNRGKSDNVPSEEVVKKMKNYWRQLLNAKLITQRKFDNLTKAERGGLSELDKVGFIKRQLVETRQITKHVAQILDSRMNTKYDENDKLIREVRVITLKSKLVSDFRKDFQFYKVREINNYHHAHDAYLNAVVGTALIKKYPKLESEFVYGDYKVYDVRKMIAKSEQEIGKATAKYFFYSNIMNFFKTEITLANGEIRKRPLIETNGETGEIVWDKGRDFATVRKVLSMPQVNIVKKTEVQTGGFSKESILPKRNSDKLIARKKDWDPKKYGGFDSPTVAYSVLVVAKVEKGKSKKLKSVKELLGITIMERSSFEKDPIDFLEAKGYKEVRKDLIIKLPKYSLFELENGRKRMLASAGELQKGNELALPSKYVNFLYLASHYEKLKGSPEDNEQKQLFVEQHKHYLDEIIEQISEFSKRVILADANLDKVLSAYNKHRDKPIREQAENIIHLFTLTNLGAPAAFKYFDTTIDRKRYTSTKEVLDATLIHQSITGLYETRIDLSQLGGD

SEQ ID NO: 264 - protein, 1368 aa, Artificial Sequence
  Synthetic Sequence
MDKKYSIGLAIGTNSVGWAVITDDYKVPSKKLKGLGNTDRHGIKKNLIGALLFDSGETAEATRLKRTARRRYTRRKNRICYLQEIFSNEMAKVDDSFFHRLEESFLVEEDKKHERHPIFGNIVDEVAYHEKYPTIYHLRKKLADSTDKVDLRLIYLALAHMIKFRGHFLIEGDLNPDNSDVDKLFIQLVQTYNQLFEENPINASRVDAKAILSARLSKSRRLENLIAQLPGEKKNGLFGNLIALSLGLTPNFKSNFDLAEDAKLQLSKDTYDDDLDNLLAQIGDQYADLFLAAKNLSDATLLSDILRVNSEITKAPLSASMIKRYDEHHQDLTLLKALVRQQLPEKYKEIFFDQSKNGYAGYIDGGASQEEFYKFIKPILEKMDGTEELLAKLNREDLLRKQRTFDNGSIPYQIHLGELHAILRRQEDFYPFLKDNREKIEKILTFRIPYYVGPLARGNSRFAWMTRKSEETITPWNFEEVVDKGASAQSFIERMTNFDKNLPNEKVLPKHSLLYEYFTVYNELTKVKYVTEGMRKPAFLSGEQKKAIVDLLFKTNRKVTVKQLKEDYFKKIECFDSVEISGVEDRFNASLGTYHDLLKIIKDKDFLDNEENEDILEDIVLTLTLFEDREMIEERLKTYAHLFDDKVMKQLKRRRYTGWGRLSRKLINGIRDKQSGKTILDFLKSDGFANRNFMQLIHDDSLTFKEDIQKAQVSGQGDSLHEHIANLAGSPAIKKGILQTVKVVDELVKVMGRHKPENIVIEMARENQTTQKGQKNSRERMKRIEEGIKELGSDILKEYPVENTQLQNEKLYLYYLQNGRDMYVDQELDINRLSDYDVDAIVPQSFLKDDSIDNKVLTRSDKNRGKSDNVPSEEVVKKMKNYWRQLLNAKLITQRKFDNLTKAERGGLSELDKVGFIKRQLVETRQITKHVAQILDSRMNTKYDENDKLIREVRVITLKSKLVSDFRKDFQFYKVREINNYHHAHDAYLNAVVGTALIKKYPKLESEFVYGDYKVYDVRKMIAKSEQEIGKATAKYFFYSNIMNFFKTEITLANGEIRKRPLIETNGETGEIVWDKGRDFATVRKVLSMPQVNIVKKTEVQTGGFSKESILPKRNSDKLIARKKDWDPKKYGGFDSPTVAYSVLVVAKVEKGKSKKLKSVKELLGITIMERSSFEKDPIDFLEAKGYKEVRKDLIIKLPKYSLFELENGRKRMLASAGELQKGNELALPSKYVNFLYLASHYEKLKGSPEDNEQKQLFVEQHKHYLDEIIEQISEFSKRVILADANLDKVLSAYNKHRDKPIREQAENIIHLFTLTNLGAPAAFKYFDTTIDRKRYTSTKEVLDATLIHQSITGLYETRIDLSQLGGD

SEQ ID NO: 265 - protein, 240 aa, Acetobacter aceti
MANIAENLVFGIDLGIGSCGWAVLNQKAKDENIVALGSWCFDVPETDKERIPTNQIRRANRLLRRVIRRRRNRMAEIRRLFASKGMLDTADPDALAKISADPWEMRAKGLDYQLTPQEFAVALGHIAKRRGFKSAAKRVSTNAPSEDSKMLAALEKTKEQSAQYRTIGEMFARDPAYADRRRNRDGCFDRTMSREDLFKETQILFESQRRLGNFSATSETEQAFIDIAFRQKPMQDSERL

SEQ ID NO: 266 - protein, 400 aa, Acetobacter aceti
SFERFRLLCRLVNLRVTDGLEDRPLTPEELRLACEDAGKTRKLSVKKVRSLIGLRDDQRFTTIPPDQEQHDIAARTGDALTGTATFRAILGESFWRQLLPHPEQLDRAAWIISFHELTDTIISKLATIGLPSEVMELIRKALEDGKFSKFKGAASLSDKAARKLIPFLQEGLTYDKACQKAGYNHAASKFTHYDSIDTKAKFNSLMDDVRDSITNPVARKAISEGMKQVWAMRNQWGLPGAICIELARDVGNSAEKRREIESGIKKNTAQRERERQEAKEHLNQSDISSETLLRYRLWKEQGGRCCYTDQPITPSQLIASDNSVQVDHILPWSRFGDDSYLNKALCTAKANQEKKNRTPWEWIHNQKGVEAWNHFTAAVESRKETRGLKKRNFLLKSSKE

SEQ ID NO: 267 - protein, 376 aa, Acetobacter aceti
YAARVMAEAVRLLYPSGNRAEKGGVKRVFTRPGALTAALRHAWGVESLKKINGKRLNDDRHHALDAAVVAAVSEKEIQKLTKSFQICEQKGLARPMRDVPMPWEGFRHQLETAYADIRVARPERRRARGKGHDATIRQLREEKDGPVVYERRAISDLKLTDLERIKDPERNSAIISSLRTWIEKGKPADYPPQSPKGDEIRKIRVMSRNKPAVSVRGGTADRGEMTRVDVFTKMGKKGKPEWFLVPIYRHQVIDRIQWPQPPNQAAANGKSEKNWPTMGLEHEFRFSLYPRSYVQIVKRDGEIIEGYFAGLDRTVAAFSLLSSSDPTSIQRGIGAKTLESIRKYNVNRFGDISMVEQETRTWHGDVCISPDQPDSA

SEQ ID NO: 268 - protein, 1054 aa, Actinobacillus suis
MKLTPLNYILGLDLGIASVGWAVVEIDEQENPLGLIDVGVRTFDRAEVPKTGESLALARRLARSARRLVKRRADRIKKAKRLLKAENILLSADEHLPNDVWQLRVKGLDQKLERQEWAAVLLHLLKHRGYLSQRKNESKSENKELGALLSGVETNHQILQSAEYRTPAEIAVKKFHVEDGHIRNQRGAYTHTFSRLDLLAEMELLFQRQTDLGNPHTSAKLLENLTALLMWQKPALAGEAILKMLGKCTFEPTEYKAAKNSYSAERFVWLTKLNNLRILEQGAERALTDNERFALLDQPYEKAKFTYAQARTMLALPDEAIFKGVRYQGEDKKAVETKTILMEMKAYHQIRKALENADLKAEWNELKNNSELLDDIGTAFSLHKTDEDICRYLDGKLSESILNALLENLNFDKFIQLSLKALQQILPLMLQGQRYDEAVSAIYGDHYGKKSAEINRLLPTIPADEIRNPVVLRTLTQARKVINAVVRLYGSPARIHIETGREVGKSYQDRKKLEKQQEDNRKQRESAVKKFKEYFPNFVGEPKGKDILKMRLYELQQAKCLYSGKSLELHRLLEKGYVEVDHALPFSRTWDDSFNNKVLVLANENQNKGNLTPYEWLDGKNNSEHWQNFVARVQTSGFSHTKKQRILSHKLDEKGFIERNLNDTRYVARFLCNFIADNMLLTGKGKRKVFASNGQITALLRGRWGLQKVRDDNDRHHALDAVVVACSTVVMQQKITRFVRYEEGNVFSGERIDRETGEIIPLHFPSPWAFFRENVEIRIFSENPKLELENRLPDYPQYNHEFVQPLFVSRMPTRKMTGQGHMETVKSAKRLDEGLSVLKVPLTQLKLSDLERMVNREREVTLYESLKARLEQFGNDPAKAFAEPFHKKGGAVVKAVRVEQTQKSGVLVRDGNGVADNASMVRVDVFTKGGKYFLVPIYTWQVAKGILPNKAVTANVDEIDWLEMDESYQFIFTMYPNDLVKVKLKKEEFFGYYGGLDRATGAIVIKEHDLEKSKGKQGIYRIGVKLALSFEKYQVDELGKNIRPCRPTKRQHVR

SEQ ID NO: 269 - protein, 239 aa, Actinobacillus ureae
MEIRIFSENPKLGLENRLPGYPQYNHEFVQPLFVSRMPTRKMTGKGHMETVKSAKRLDEGLSVLKVPLTQLKLSDLERMVNREREDALYQSLKAHLEQFGNDPAKAFAEPFHKKGGTVVKAVRVEQTQKSGVLVRDGNGVADNTSMVRVDVFTKAGKYFLVPIYKWQVAKRILPNKAVTAGVDEIDWLEMDSSYQFIFTMYANDLVKVKLKKRSILGLLRWFRSCNWGYCYQRTRFREI

SEQ ID NO: 270 - protein, 400 aa, Actinobacillus ureae
MKLTPLNYILGLDLGIASVGWAVVEIDEQENPLGLIDVGVRTFDRAEVAKTGESLALARRLARSSRRLVKRRADRIKKAKRLLKAENLLLSADEILPNDVWQLRVKGLDQKLERQEWAAVLLHILKHRGYLSQRKNESKSENKELGALLSGVATNHQLLQTAEYRTPAEITVKKFQAEENGHGHIRNQRGDYSHTFDRKDLLAEMKLLFQRQAELGNPHTSEKLLENLTTLLLWQKPALAGEAILKMLGKCTFEPAEYKAAKNSYSAERFVWLTKLNNLRILENGIERALTDNERFTLLDQPYEKAKLTYAQARTMLALSDEAIFKGVRYQGEDKKAAEKVALIEMKGYQHIRKALEGAGLKAEWNELKNNSELLDDIGTAFSLYFSISNLPTEIAYFTP

SEQ ID NO: 271 - protein, 1113 aa, Actinomyces georgiae
MSASSQNVERIRYKVGIDVGLRSIGFCAVQVDADDRPVKLLNTVVHVHDAGVSPADAKKADTRKLVSGVARRTRRLYRTRKRRLVDLDRQLDGLGWPLVDPARFADPREPWFAREKLVSGRVDDADERKELLSVALRHIAHHRGWRNPYSTVESLQADAPPSEFLQGLNQRVSEKLGTELDPGLTQGQLVAKLLHRFPNAKIRGPEGILRGKLHQSDNAGELRLICRTQGLDCHITEELVRLVFQAKSPKANKEMRKRIGRDQLPGQGAHIRAEKAHPVFQRFRIVAVLANLRIREAHVDRRLTAEEMRTLTDFLLGLAGSEQPTWEELADNLNIERHQLRGTAKASVDGAPALRFPPIDATTDRIYASKLKWLAEWWRQADEERRGYMVDALSNSGGSEDEPYLDDEIAEMLEQASEEDQAKLDSLHLPGGRASYCLDTLRRLTDAMLGGGLDLFEARKAVFHVDDDWAPPTDPIGAPVGNPPVDRVLKHVARWLEAATGRWGAPQTINIEHVREGLGSEKAARELTRMNDRRRRNNQKLVEEMGEKLGMSGRIRRSDRMRYEAIRRQNCECLYCGQPITYQTMEMDHIVPRAGAASTNSRSNLAAVCRRCNHQKGKLPFAVWAESQDSPAEVRLQDAVQRVRHWLRDAGMGQKELQALRVQVIARLKSKRPDEEFDGRSMESIAWMANELRARVEAQYRGSGTTVRVYRGALTAEARKASGFEGRVNLIGGRGKDRFDRRHHAMDALVIALMNQSVAQTLALRLNMRDSQWLTQSEQTWRQFHGAPGEAARKWEAWDRDMRDASDLFNLALDGGRIPITENVRLRVGNGRVHEDGVIRFKPEYEVKGKTIKGGEARLLGDSLPSEQIDRAETPALWTALTRLPEYDRKSGLPENPDRVIRVNGAVVQATDRIRFFGTPASVAVRGGYAKLGESIHHARIYRINGKTPKYAMIRVYTIDLMRLNHEDIFTAVLKPSTISMRCAEKKLKYAIAEGNAEQIGWLVEGDQLELDAAAYAKGVGADLMREYPMATCWRVAGFPDEAKLRLRPVLLAAEGMGEDAPKFMREVLENQGWRPAVNALLSPGSVRVVRRNVLGEPRFKSSGHLPTTVDLV

SEQ ID NO: 272 - protein, 1101 aa, Actinomyces naeslundii
MWYASLMSAHHLRVGIDVGTHSVGLATLRVDDHGTPIELLSALSHIHDSGVGKEGKKDHDTRKKLSGIARRARRLLHHRRTQLQQLDEVLRDLGFPIPTPGEFLDLNEQTDPYRVWRVRARLVEEKLPEELRGPAISMAVRHIARHRGWRNPYSKVESLLSPAEESPFMKALRERILATTGEVLDDGITPGQAMAQVALTHNISMRGPEGILGKLHQSDNANEIRKICARQGVSPDVCKQLLRAVFKADSPRGSAVSRVAPDPLPGQGSFRRAPKCDPEFQRFRIISIVANLRISETKGENRPLTADERRHVVTFLTEDSQADLTWVDVAEKLGVHRRDLRGTAVHTDDGERSAARPPIDATDRIMRQTKISSLKTWWEEADSEQRGAMIRYLYEDPTDSECAEIIAELPEEDQAKLDSLHLPAGRAAYSRESLTALSDHMLATTDDLHEARKRLFGVDDSWAPPAEAINAPVGNPSVDRTLKIVGRYLSAVESMWGTPEVIHVEHVRDGFTSERMADERDKANRRRYNDNQEAMKKIQRDYGKEGYISRGDIVRLDALELQGCACLYCGTTIGYHTCQLDHIVPQAGPGSNNRRGNLVAVCERCNRSKSNTPFAVWAQKCGIPHVGVKEAIGRVRGWRKQTPNTSSEDLTRLKKEVIARLRRTQEDPEIDERSMESVAWMANELHHRIAAAYPETTVMVYRGSITAAARKAAGIDSRINLIGEKGRKDRIDRRHHAVDASVVALMEASVAKTLAERSSLRGEQRLTGKEQTWKQYTGSTVGAREHFEMWRGHMLHLTELFNERLAEDKVYVTQNIRLRLSDGNAHTVNPSKLVSHRLGDGLTVQQIDRACTPALWCALTREKDFDEKNGLPAREDRAIRVHGHEIKSSDYIQVFSKRKKTDSDRDETPFGAIAVRGGFVEIGPSIHHARIYRVEGKKPVYAMLRVFTHDLLSQRHGDLFSAVIPPQSISMRCAEPKLRKAITTGNATYLGWVVVGDELEINVDSFTKYAIGRFLEDFPNTTRWRICGYDTNSKLTLKPIVLAAEGLENPSSAVNEIVELKGWRVAINVLTKVHPTVVRRDALGRPRYSSRSNLPTSWTIE

SEQ ID NO: 273 - protein, 1181 aa, Actinomyces sp.
MLHCIAVIRVPPSEEPGFFETHADSCALCHHGCMTYAANDKAIRYRVGIDVGLRSIGFCAVEVDDEDHPIRILNSVVHVHDAGTGGPGETESLRKRSGVAARARRRGRAEKQRLKKLDVLLEELGWGVSSNELLDSHAPWHIRKRLVSEYIEDETERRQCLSVAMAHIARHRGWRNSFSKVDTLLLEQAPSDRMQGLKERVEDRTGLQFSEEVTQGELVATLLEHDGDVTIRGFVRKGGKATKVHGVLEGKYMQSDLVAELRQICRTQRVSETTFEKLVLSIFHSKEPAPSAARQRERVGLDELQLALDPAAKQPRAERAHPAFQKFKVVATLANMRIREQSAGERSLTSEELNRVARYLLNHTESESPTWDDVARKLEVPRHRLRGSSRASLETGGGLTYPPVDDTTVRVMSAEVDWLADWWDCANDESRGHMIDAISNGCGSEPDDVEDEEVNELISSATAEDMLKLELLAKKLPSGRVAYSLKTLREVTAAILETGDDLSQAITRLYGVDPGWVPTPAPIEAPVGNPSVDRVLKQVARWLKFASKRWGVPQTVNIEHTREGLKSASLLEEERERWERFEARREIRQKEMYKRLGISGPFRRSDQVRYEILDLQDCACLYCGNEINFQTFEVDHIIPRVDASSDSRRTNLAAVCHSCNSAKGGLAFGQWVKRGDCPSGVSLENAIKRVRSWSKDRLGLTEKAMGKRKSEVISRLKTEMPYEEFDGRSMESVAWMAIELKKRIEGYFNSDRPEGCAAVQVNAYSGRLTACARRAAHVDKRVRLIRLKGDDGHHKNRFDRRNHAMDALVIALMTPAIARTIAVREDRREAQQLTRAFESWKNFLGSEERMQDRWESWIGDVEYACDRLNELIDADKIPVTENLRLRNSGKLHADQPESLKKARRGSKRPRPQRYVLGDALPADVINRVTDPGLWTALVRAPGFDSQLGLPADLNRGLKLRGKRISADFPIDYFPTDSPALAVQGGYVGLEFHHARLYRIIGPKEKVKYALLRVCAIDLCGIDCDDLFEVELKPSSISMRTADAKLKEAMGNGSAKQIGWLVLGDEIQIDPTKFPKQSIGKFLKECGPVSSWRVSALDTPSKITLKPRLLSNEPLLKTSRVGGHESDLVVAECVEKIMKKTGWVVEINALCQSGLIRVIRRNALGEVRTSPKSGLPISLNLR

SEQ ID NO: 274 - protein, 1120 aa, Actinomyces sp.
MNAMKQYNAGIDVGINSVGFAAIEVDSKGLPLNILNNMVVLHDSGVDPGTAKTGATRLANSGTARRTRKLIARRRKRLQKLDRYIEVQGWPLVDFSSLPDPYTPWKIRAKLTQDRLEGEEQGRGLSIALRHMARHRGWRNPYEGVESLHSPKEASKQFKDLKDRVTKVSGVIFDEDATPAEVVCDIGLSPKQRLRSAPSAKYKEGATLADEPVGGKSKEGLLGGKLMQSDNANELRKIGIVQGLSNEKVNEIIDQVFASESPKGQAGKRAKKDELPGQEQYVRALRAHLAFQRFRIVAAVANLRILEAEPKHERLLSQSEKDKVIEFLMSADGDDGVTWSDVAEELGIERECLSGTAKRGADGERPSSFPPTNSTNISIVRSKVKPLIEWWRKASDDEQATLVTALSNADELTDDQPSAETVRQFLSSPDEQSQEKIDKISLPKGRAAYSVNSLERLTRRMLKDSVDLFEARKREFGVDNNWTPTPDSIGEPVGNPAVDRVLKIVNRWLLAVTRKWGPPKVVNIEHVRVGFTSAAQTRKYEEENKTNRERNLAILEELRDKFGTSGKIRREDITRFAALRRQNCQCAYCGEAITFFDCEMDHIVPRKGPGSTNTRNNLVAICERCNKSKSNMPFSLWAQNCDIPGVSVEAVIDRVRTWIKDPELNPKQYNNFKKDVIERLRKTVDDDAIDNRSIESVAWMATELADRIGSHFRTAGANTKVRVYRGWLTSEARKASGFEGKINLIGGRGKTRLDRRHHAMDAATIALMRQSVAQTLVERASIRESDRLRRVVSSSWKDYRGADRDKQFSYGSWLNSMNALAELFNRAIDADGIPVTQNLRLRLGNGEAHDATIRSLEKKRVGASWTIGEIDRASTPQLWLALTRQEDFDQNDGLPANASRELRVKNHWFHAEENVTLFPTKSAAIAVRGGYAEIGNTIHHARLYKLPGKKLTYGMIRVFAIDLLCAWHTDLFSSPLLPESISLRTAETKVRRAVEDGAAMYIGWLVDGDEIVLDPETKAFKSNKIGEYLCEFPGTKRWKVDGFPDKEKLRLRPLQLAGEGLPEDVSAGTEEILGPKGNGWRVAINALFKSSQLVVVRRTALGMVRKLSRRHLPLTTRLRG

SEQ ID NO: 275 - protein, 1095 aa, Actinomyces sp.
MPAHHLRVGIDVGTHSVGLATLRVDDQGTPIELLSALSHIHDSGIGKEGQKDHDTRKKLSGVARRTRHLLRNRRERLQQLDKVLVDLGFPIPKPEEYPDLSERTDPYRVWRVRARLVEETLPEELRGPAISMAVRHIARHRGWRNPYSKVESLLSPAEESSFMKALRKRIMTKTGEVLDDDITPGQAMAQVALTHKIYMRGPEGILGKLHQSDNANEIRKICARQGISSDVCKQLLRAVFKAESPRGSAVSRVAPDPLPGQGSFRRAPKCDPEFQRFRIISIVANLRISETKGENRPLTVDERRQVVAFLMEDSQADLTWVDVAEKLRVSRQALRGTAMLTADGERSAAQPPIDVTDQIMRKTKISALKTWWDKADAERRGAMVRYLYEGLEDSECAEVIAKLPEKDHAKLDSLHLPAGRAAYSRESLTALSDHMLETTNDLHEARKRLFGVDDSWAPPAEPVGAPVGNPSVDRTLKIVARYLSAVESIWGTPEVIHVEHVRDGFTSERTAEERDKANRSRHNDNQKAIEKIQHDYGKEGYISRGDIVRFHALKLQGSACLYCGTTIGYHTCQLDHIVPQAGPGSNNRRGNLVAVCERCNHSKSNTPFAVWAQKCGIPHVGVKEAISRVNGWVEHNHSTSSGDLTRLKKEVIARLRRTQKDPEIDERSMESVAWMANELHHRIAAAYPETTVMVYRGSITAAARKAASIESRINLIGEKGRKDRLDRRHHAVDASVVALMEPSVAKTLAERSSLRGEQRLTGQEQTWKQYTGLTVGARERFEAWRGHMHRLTELFNESLAADEVYVTQNIRLRLSDGSAHTVKASKLVSHRLGDGLTVQQIDRACTPALWCALTREIDFDEKNGLPAREDRVIRVHGQEISSADCIQVFSKRKKTKSDRDEAPFGAIAVRGGFVEIGSSIHHARIYRIEGEKPAYAMLRVFTHDLLSQRHGDLFSAVIPPQSISMRCAATELRQAISEGRATYLGWIVSGDELHIPVETFTTHKIGSFLKDYPNTTRWRICGYDSETMLILKPRILSAEGLNNSSDIAEYVIKNKGWRVAINKLAKVHPTVVRRDALGRPRHSSRSNLPVTWSIE

SEQ ID NO: 276 - protein, 1144 aa, Actinomyces sp.
MSMIDSSENVPGIRYRVGIDVGLKSIGFCAVEVDRNDQPVRMLNSMVFIHDAGVDPNENKAAKSRKLTAGVARRTRRLYRTRHQRLVNLDRVLSKEFGWPLPDLTSFKDPREPWHVRAGLLEGYIADDEKRKEALSIALRHIARHRGWRNPYAKVETLLQPSEPSDFLKGLNDRISEELGRAFPADATPGQLVDTYLAHPDYVGRAGTPKLRGPQGILAGKLHQSDNAQEIRGICDVQRIEPAERDRLIRVVFEAKSPKGSAKERGLVGYDELPGQGRHVRAEKAHPAFQLFRMVSVLANLRIREGREERPLTPDELEDLVDFINQVSLKQEVTWQDLADKLRIERADLRGTAKASFDGSPVLRNPPTDVTTEKIMACKVKWLKEWWKEADDEQRGYMVDAFSNSGGSEDGTDVNDEVAELLEQATEDDQLEFEKISLPQGRAAYSLDSLRRLTDRMLRDGVDLHTARRLEFNVGDDWKPAVEPIGAPTGNPAVDRVLKQVSRWLHAATERWGEPTVINIEHARDGLGSERVARELMRENEKRRKANASAVAEMAAKLKLSGKVHRSDQIRYFALQRQNCQCLYCGAPITYTTAEMDHIVPRADGSSTNDRSNLAAVCRTCNHMKGKIPFAVWASSDKANQGVSLTGALERVNMWQRDSGMSPRQLKQLQREVCARLKSKKPDQEFDGRSMESVAWMAVELRTRIEGFYRSRDEESVPSVGVYRGQLTAEARRASGFESRVNLIGGRGKTRFDRRHHAMDALVIALMNPSVSRTLALRLNMRDAQRLTGVEETWKHFYGKPGEASKRFESWRESMLRGVELFNIALSDNAIPFVENIRLRVGSSVIHDATVHSFCPPKTPDGKQIITKGYGEQHSLGSAMPVELIDRAETPALWTALTRCPDFDPKKGLPENPQRTISVNGTRVGPTELVNFFEFSKSGPKACLKVRGGYVDLSGAIHHARIYRIAGKKTAYAMIRVFQVDLLRLKDHDVFTTPLKPSTISMRTAEPKIREALANGTATQIGWLVEGDELVIDTSKYSGGFIGEVLARYPEATSWRVAGFMTPAKLRIKPILLSKEGFVDETQAALLGVEVTSEAIQKTVDRPGWLPAVNVLFGAGGVRVIRRNCLGEERYHSSASLPVSMTLE

SEQ ID NO: 277 - protein, 1103 aa, Actinomyces sp.
MTKINDDLRYRVGIDVGLKSIGFCAVEVDENDQPLRLLNSMVFVHDAGVDPNENKAAKSRKLTAGVARRTQRGTAQNRRRLAELDRALSEELNWPLPNLEDFEDSYEPWHTRAELVEHYIKDDAERAEALAIAIRHIARHRGWRNPYLSVDSLLTPQEPSKFLRGLNERVTQALGREFPADATPGQLICAYIDSPKYAETQGIRGDSGILSGKLHQFDNVGEIRKICEVQRLDHDVFKLLVRKVFFAKSPRGSAAGLVGHDQIPGQGKYIRAEKAHPDFQLFRIVAVLTNLRIREGKAERCLTPDELRGLVDYILEVQLKQQVTWADLADNLGIERTDLRGTARASFDGSPALRFPPTDVTAEKIMASKVKWLKDWWDKADSERRGFMVDALSNSGGSTGDNDIDDEVAALLEAATEDEQAELEKIQLPQGRAAYSLDSLRRLTKRMLEEGVDLHTARKEEFNVDDDWRPEPEPIEAPVGNPAVDRVLKQVARWLNMATDRWGVPDVINIEHTRDGLGSEKVARELLRESQKRQDLNQKDMDKMIRELGISGKARRSSLIKYQAIQRQNSMCLYCGTEIGFETAEMDHIVPRALSGSTNDRSNLAAVCRACNHQKGAVPFAVWATSGEAHAGVSLEDAIKRVRLWQKGPGMSPKQHKAFQNEVISRLKSRKPDEEFDGRSMESVAWMAVELRTRIDGYYRKVNSDSVPKVGIYRGQLTAEARKASGFENRVNLIGGKGKTRFDRRHHAMDALVIAMMNQSVSQTLALRVNMRESQRITGQEETWKNFYGKPGQASERFEKWREGMLRAVELFNIELAKNAIPFHENVRLRVGSSKVHDDTVRKFIHAKLGEALSVAMIDCAETPALWTALTRLPDFDPKDGLPEDLSREIYIHSRKITADEQLNFFNSPSACLKVRGGYVEIGSSIHHARVYRIDGKKTTYSMVRVFATDLVKMTHEDVFTTPLKPSTISMRTADPKIRKALADGTATQIGWLVEGDELQLETDKYSGGLIGEVLAEYPQLTSWRVAGFYGVTQLRLRPYMLAAEGIPSDASESLRKVIEGKGWLPAINALLSSGCVKVVRRNCLGEPRFNAKSSLPVSQLLR

SEQ ID NO: 278 - protein, 1114 aa, Actinomyces turicensis
MQFHFYMVYVTMKGMNDKDASQQLRYRVGIDVGTHSIGFCAVEVDESGMPIQLLNSMVHKHDSGIDPGGNDTATTRLAEAGVARRTRRLIRRRKKRLQELDAFIEECGWPLVDLATITDARSPWRIRAHLATEHIDDEAEQGKLLSIALRHMARHRGWRSPYARISSLHIQADPSEQLKALAQRVSEKTGISLTADQTPAQLISVYLDVFETGKLRGPEGILGGKLMQSDNANELRRIATVQGLDNDLLKKIIGFVFAAESPKGSAAKRVGKDVLPGAHGLRAEKAHPAFQQFRIVSIVQNLRIKEGTGLRALTSEETEIVVDFLNQAGLTEAPTWEEVADNLEIPRSHLKGTATEGFDGIAPSTRPPFDVTSQKILNGKLKKLSAWWKDADYDHRCAMVNALSNVGSDDEGSLADDDVREFLSDFTDEELEALDKVELPGGRAAYSVDSLEKLTNTMLSEGCDLHSARKIAFGVDDSWTPPAEPIGQPVGNPAVDRVLKQVARWISAATNQWGTPESVNIEHVRDALGSEKASREYQRSLQTRRIRNEKLFAEMRERLDIGGKPRRSELTRYLALQRQNCQCLYCGMPITYTDAEMDHIVPRKGAASTNTRENFAAVCRACNHQKSNLPFAVWAEKTERPGVSVKEAYKRVSDMRIEPGMNGRQMNEFRKAIRLRLTTKHADAEIDGRSLESVAWMANELRHRIEGFYRSAENDVTVRVFRGAVTAEGRRASGFESRVNLIGGKGKTRLDRRHHAMDALTIALMEPGIAQTIALRMNMRESQRVLGEQETWKSFTGGSDTARKRWEHWCEEMLRASELFNVFLAEDRIPICQNKRLRLGSSAVHKAIVQPFEASDKRIVSDAMPVELIDRASTPALWTALTRDPDFDPKEGLPANPSRTIRLHDKRLGPNETVEFFPTAAACLAIRGGYCEIGAGIHHARIFRISGKKTTYAMLRVYQCDLVRFQKENLLTVELPANTISVRTAVPKLREALAHGTAEQIGWLVVGDELKIDLSGFTTGQIETFNETYPQATRWEVTGFPTKTQLRLKPLLIASEGLADDVPDDIVKIVKGPGWWPAIDKLLKIGNVVLYRRDTHGKPRVVSHRSLPLSSKLQ

SEQ ID NO: 279 - protein, 1113 aa, Alcanivorax sp.
MRYRVGLDLGTASVGAAVFSMDEQGNPMELIWHYERLFSEPLVPDMGQLKPKKAARRLARQQRRQIDRRASRLRRIAIVSRRLGIAPGRNDSGVHGNDVPTLRAMAVNERIELGQLRAVLLRMGKKRGYGGTFKAVRKVGEAGEVASGASRLEEEMVALASVQNKDSVTVGEYLAARVEHGLPSKLKVAANNEYYAPEYALFRQYLGLPAIKGRPDCLPNMYALRHQIEHEFERIWATQSQFHDVMKDHGVKEEIRNAIFFQRPLKSPADKVGRCSLQTNLPRAPRAQIAAQNFRIEKQMADLRWGMGRRAEMLNDHQKAVIRELLNQQKELSFRKIYKELERAGCPGPEGKGLNMDRAALGGRDDLSGNTTLAAWRKLGLEDRWQELDEVTQIQVINFLADLGSPEQLDTDDWSCRFMGKNGRPRNFSDEFVAFMNELRMTDGFDRLSKMGFEGGRSSYSIKALKALTEWMIAPHWRETPETHRVDEEAAIRECYPESLATPAQGGRQSKLEPPPLTGNEVVDVALRQVRHTINMMIDDLGSVPAQIVVEMAREMKGGVTRRNDIEKQNKRFASERKKAAQSIEENGKTPTPARILRYQLWIEQGHQCPYCESNISLEQALSGAYTNFEHILPRTLTQIGRKRSELVLAHRECNDEKGNRTPYQAFGHDDRRWRIVEQRANALPKKSSRKTRLLLLKDFEGEALTDESIDEFADRQLHESSWLAKVTTQWLSSLGSDVYVSRGSLTAELRRRWGLDTVIPQVRFESGMPVVDEEGAEITPEEFEKFRLQWEGHRVTREMRTDRRPDKRIDHRHHLVDAIVTALTSRSLYQQYAKAWKVADEKQRHGRVDVKVELPMPILTIRDIALEAVRSVRISHKPDRYPDGRFFEATAYGIAQRLDERSGEKVDWLVSRKSLTDLAPEKKSIDVDKVRANISRIVGEAIRLHISNIFEKRVSKGMTPQQALREPIEFQGNILRKVRCFYSKADDCVRIEHSSRRGHHYKMLLNDGFAYMEVPCKEGILYGVPNLVRPSEAVGIKRAPESGDFIRFYKGDTVKNIKTGRVYTIKQILGDGGGKLILTPVTETKPADLLSAKWGRLKVGGRNIHLLRLCAE

SEQ ID NO: 280 - protein, 1146 aa, Alicyclobacillus hesperidum
MAYRLGLDIGITSVGWAVVALEKDESGLKPVRIQDLGVRIFDKAEDSKTGASLALPRREARSARRRTRRRRHRLWRVKRLLEQHGILSMEQIEALYAQRTSSPDVYALRVAGLDRCLIAEEIARVLIHIAHRRGFQSNRKSEIKDSDAGKLLKAVQENENLMQSKGYRTVAEMLVSEATKTDAEGKLVHGKKHGYVSNVRNKAGEYRHTVSRQAIVDEVRKIFAAQRALGNDVMSEELEDSYLKILCSQRNFDDGPGGDSPYGHGSVSPDGVRQSIYERMVGSCTFETGEKRAPRSSYSFERFQLLTKVVNLRIYRQQEDGGRYPCELTQTERARVIDCAYEQTKITYGKLRKLLDMKDTESFAGLTYGLNRSRNKTEDTVFVEMKFYHEVRKALQRAGVFIQDLSIETLDQIGWILSVWKSDDNRRKKLSTLGLSDNVIEELLPLNGSKFGHLSLKAIRKILPFLEDGYSYDVACELAGYQFQGKTEYVKQRLLPPLGEGEVTNPVVRRALSQAIKVVNAVIRKHGSPESIHIELARELSKNLDERRKIEKAQKENQKNNEQIKDEIREILGSAHVTGRDIVKYKLFKQQQEFCMYSGEKLDVTRLFEPGYAEVDHIIPYGISFDDSYDNKVLVKTEQNRQKGNRTPLEYLRDKPEQKAKFIALVESIPLSQKKKNHLLMDKRAIDLEQEGFRERNLSDTRYITRALMNHIQAWLLFDETASTRSKRVVCVNGAVTAYMRARWGLTKDRDAGDKHHAADAVVVACIGDSLIQRVTKYDKFKRNALADRNRYVQQVSKSEGITQYVDKETGEVFTWESFDERKFLPNEPLEPWPFFRDELLARLSDDPSKNIRAIGLLTYSETEQIDPIFVSRMPTRKVTGAAHKETIRSPRIVKVDDNKGTEIQVVVSKVALTELKLTKDGEIKDYFRPEDDPRLYNTLRERLVQFGGDAKAAFKEPVYKISKDGSVRTPVRKVKIQEKLTLGVPVHGGRGIAENGGMVRIDVFAKGGKYYFVPIYVADVLKRELPNRLATAHKPYSEWRVVDDSYQFKFSLYPNDAVMIKPSREVDITYKDRKEPVGCRIMYFVSANIASASISLRTHDNSGELEGLGIQGLEVFEKYVVGPLGDTHPVYKERRMPFRVERKMN

SEQ ID NO: 281 - protein, 1552 aa, Anaerophaga sp.
MFSQRNNPYCELLQNVKQLYKEKFGKTNQVDNSIIYGFMKRILGLDLGTNSIGWALVENDENDRKGKIIGMGSRIIPMDMSELDNFNKGASISKTAERTRLRMTRRLRERHLLRRARLHRILNIMGFLPEHYRNSIDFIDKKGCFFEGQEPKIAYKPDKNSEQFCFLFTSSFHEMLEDFRKFQPELIQNRKKVPYDWTIYYLRKKALTQKISKEELAWIILNFNTKRGYYHLRGEDEDNQDNKKIKEFRALKVVNVTEREGANSSGKKWYDMELENGWVYSRQSNLPPNLEGKTIELIVSYTLDNNGNIKKDKNGKEKYSLSMPGEEDWNLVKIKTENDLKTSKKSVGEYIYDHLLKNPDQKIRGKLISTIERKFYKEELSRILKTQMNFYEELKNRELYQKCVEELYPNNKSHQQTLLQKDFIHLIVEDIIFYQRPLKSKRAFVNNCPLEYRVYVDKKSGELIKSGVKCIPKSHPLFQEFRLWQYVRNLRIYERERMVNGRLMVNVDVTNELLPDEEHIVRLFDLLNDRKSFKQDDVLRFVGIKSPKDRKRYSWNYPEDKELPGNETRHLILAWLKKVDGVPEDWLDPEKLKALWHLLYSVTDREEIIKGLHSFAKKYELPDTFVEHFKKIPRLEREYGSFSEKAIKKLLPLMRMGKYWKAEEIPADLLEKAQKIIDAEADDRISDEVREKLLHLKDISQLKGLPLWQASYLVYGRHSETGEVVKWRTSEDLEKYILQFKQHSLRNPVVEQVILEALRVVKDIWEHYGEGKEGFFNEIHVEIGRELKNPADKRKKITSQIQENENTNLRIKALLEELFNDPSVKNVRPYSPAQQEILRIYEDGVLNGQKEIPDDILKISKMARPSKSQLVKYKLWLEQKYRSPYTGEIIPLSQLFTSAYEIEHIIPQARYFDDSFSNKVICEAEVNREKGHQLAFEFITKRGGDEIELNFGKKVTILNVEEYQKFVKDHYGRSLRSLSKMRKLLMEDIPDDFIDRQLNDSRYISKVVRNLLSNIVRAEDENSLVSKHLITCTGGVTTRLKHEWGLNDVWNELITPRFVRLNKMGKEKFGEWINKKGKQVFQIQMPLELQKGFNKKRIDHRHHALDALVVACASRSHVNYLNNDSARANASETRYDLRNKLCYKDKTDSNGNYRWKFYKPWESFTEEAKNRLAGTVVSFKSNRRIMTRSSNRYFKWVDTSEGKKKKLVRQIKGDNQAIRKPLHKDTVLGKVSLRKEKKVSLSKAIDLWESIVDKPLKKRIQSLREQGYDKKLLLKYFKDRNNQFNGQDISRVNIYFFDNNLAARRVTLDASFNSEKRIDGITDSGIKKILYAHLQNEKYHGKKDEKGNEISPYELAFSPEGLEEMNANIKKLNGGKPHCPIYKVRLAETIGEKFKLGEKGNKNKKYVEAAKGTNLFFAVYVDEKGVRSFETIPFSVALERRKQKLAVVPEENENKEKLLFYLSPNDLVYVPDEDEKLIDYRQLSINPTRIYKMVSSSGTQCFFIPHFVASPIVQTMELGPNNKSERAWDGQMIKNVCYKLSVDRLGNVKIEK

SEQ ID NO: 282 - protein, 1515 aa, Anaerophaga thermohalophila
MKRILGLDLGTNSIGWALVESDEEQKSGKIQGIGSRIIPMDQNELDNFNKGNTVSQTAERTRLRMVRRLRERHLLRRERLHRVLKEIGFLPEHYLEQIDFTEKPGGFLPGKEPKIAYKPDNFKDKYDFLFQDSYHEMLSDFQDKNPEFIQKRKKVPQDWTIYYLRKKALTAKITKEELAWIILNFNQKRGYYQLRGEDEDVAKNTKKEEFHALKVVKVKEREDSEGASGKWYDIELENGWVYPRQSNIRPDWEGKILELIVTYNLDKDGNIKTDKEGNEKRSFRMPNKDDWTLRKKRTENEIEKSGKTVGEYIYDNLLDAPDLKIRGKLVSTIERKYYRSELEQILTAQKKYHPELSNSELFNKCISNLYPNNDIHRKALLSKDFVHLIINDIIFYQRPLKSKRSTVSNCPLEYRVYVDKVTGEKKKVPLKCIPKSHPLYQEFRLWQYVKNLRLFEKERFENGRLLTNVDVTEQFLPDEDKYVELFEFLNGRKTFKQDDILKFAGIKSAKDRVKYYWNYPQEKEYPGNETRYLIESRLKKIENVPDEWLNYEKIEELWHLLYSVTDKVEIEKGLQSFAAKYQLPDLFVEVFKGFPRMEREYGAFSKKAIKKLLPLMRMGKYWKLENINPDLIEKVQKIIDGEADDNINDGIRERFSEINEMSDLRGMPLWKASYLVYGRHSEAAEVIRWRTSADLDQYIKDFKQHALRNPIVEQVVLEALRVVKDVWNYFGEGREKFFDEIHVEIGRDLKNPADKRQKIANQIQENENTNLRIKALLVELFNDPEVQNVRPYSPVQQQLLKIYEDGVLNAERDIPDDIQKISRMANPTRNQLIRYKLWLEQKYRSPYTGEIIPLNKLFTSEYEVEHIIPRARYFDDSFSNKIISEAEVNRKKDRMLAFEFIKKLGGSTIDLNYGKKVSVLTVEEYQQFVKDHYGINPHSRLKMQKLLMDEIPESFIERQLNDSRYISKMVRNLLSNIVREENENSPVAKQLITCSGSITNTLKQEWGLNDVWNTIITPRFERLNKMGEQKYGEWVNKEGKPVFQIQMPLELQKGFNKKRIDHRHHALDALIVASATRSHVNYLSNEAAKTNAKDTRFDLRNRLCYKEKRGQNRNFTWRFYKPWNTFTEDAKNALNDIVVSFKSNHRVINKSTNRYFKWENLPGGMKKKRLVRQEKGDNWAIRQSLHKDTVLGKVSLRKVKPVSLSVALDSWNNIVDKALKKKIRSLKDQGYDKKLMLKYFKDRRNEYNGENISRVNVYYFDEEMAARRVDLDTSFNSEKRIEGITDSGIKKIIYAHLKNEKYHGQKDDKGKDISPYELAFSPEGIAEMNANIKQLNGGKPHCPIYKVRLAEPVGEKFQLGETGNKTEKLVEVAKGTNLFFGVYANDEGVRSFATVPFYLAVEREKQGLPAVPQENENGDQLLFWLSPNDLVYVPSEEDAHFANPKQIELDNSRIYKMVSSTGTQCFFIPHFVATPIVQTIELGPNNKSERAWDGQMIKKVCYKLSVDRLGNVEIE

SEQ ID NO: 283 - protein, 333 aa, Bacillus cereus
MMNPNNFTKEDFWRTIILYGLNQATYKIALGQSLIRFSEQQRNVVSMNELAEDFFDMYLERLKNGKPQLATPNRQTAMERIINSYNIGRLTRSQAIEKVEREAFNDVIDRFHTVDSLQVPMKFYEKTDKGIVIFDNVFEIFSDNNNFELRNELDARWDLLESAFEIKRTDSQLVNDIRKLYLANGYERTDITKNRSVLNGYQSNVCFYCGELMSDDDVHVDHVIPRQLINHDDIWNLVLSHGFCNQQKSDNLPDVNYIEKLIERNEYFIKSNHPISNKLKERLGNTPRRRRTTIDRIYEHAKLVLAPWKGIYGYNPATDPFYKTFIRNIVLSK

SEQ ID NO: 284 - protein, 1068 aa, Bacillus cereus
MRYVLGLDIGIASCGWAVINQEKERIEDLGVRIFDKAENPKDGKSLAAPRRDARSTRRTLRRKKHRMQRIKILLVKQGLLFKTELNHLYESATEFDVWNLRLDALERKLHPKEFARVLIHLAKRRGFKSNRKETTLSENGQILESISENQQIMEQQNYRTVGEMILKDKKFENHKRNKDGTYIGTVTRQQLQDEIQMIFHTQRLYKNDYATEEFESSYLEIWASQRPYASKDQIEKMIGYCTLEPKEKRTPKASWSFQYFVALQTINNLRLISKDKIEELSFEEKKQIMNLALEKPIVKYIDIRKLLSIPNDFQFNSLSYSADTVDTTLENKRCIELKEYHSINKVYKQVYGKNTPNLLPIDYDTIAYGLTIFKDDKDILEYLQNKYVNAKGKPIKNLAKKTYDDTFIQALLNLNFTKMGHLSFKALKNIIPFLEEGLSYDKACEKAGYNFKGTSYTERTKYLPVIPQNTNPVVHRALSQTRKVINAIIKKYGSPNAIHIETARELSKTFQERKEIDSRYQDNSKKNEHAIHKLKELGNINPSGINIVKFKLWSEQDGRCMYSGKYIEPHRLFEEGYTEVDHILPYSRSLDDSYNNKILTLGTENQRKGNKTPYEYMGNTSIWDEFETRVQSNKKINFKKQQKLLLQNFSYAREQEFIERNLNDTRYATIYLTSLIQQHLIFSESSSKKKVRTVSGIITSHLRSRWGFNKDRKEGHIHHALDAVIVAVTSNHMIQRVTKYYKLKELNKNLQAKQLPFPEPWEGFRLELEARISPNTQQYLKGIHFKNYADVNLSDIKPIFVSRMPKRSITGELHQETIRKFLGYNEKGKVLTAIKTKLEDIPFDANGDFPMYGKETDLYTYNAIKERYLSHEKDKRKSFQEPLYKPTKSGEIGPLIKSIKIMDTRTIVNPVNQGKGVVYNSKIARTDVFKKEDKYYLIPIYTIDLLKNILPHKAITAGKGYEDWTTIDSSFTFLFSLFPNDLIQIVPSKNKTIKARTTVSKKEILLPSLTGYFKGVHSGTAGITVETHDGSVIANVGSKQLLLFEKYQVDVLGHYTKIKEEKRMGMAI

SEQ ID NO: 285 - protein, 1078 aa, Bacillus cereus
MRYVLGLDIGIASCGWAVINQEKERIEDLGVRIFDKAENPKDGKSLAAPRRDARSTRRTLRRKKHRMQRIKVLLVKHGLLSKTELDHLYESATEVDVWNLRLDALERKLYPKEFARILIHLAKRRGFKSNRKETTLSENGQILESISENQQIMEKQNYRTVGEMILKDKKFENHKRNKNGTYVGTVTRQQLQDEIQMIFHAQRLYKNDYATEEFESSYLEIWASQRPYASKDQIEKMIGYCTLEPKEKRAPKASWSFQYFVALQTINNLRLISKDRIEELSFEEKKQIMNLALEKSIVKYIDIRKLLSVPNEFQFNSLSYSADTVDTAVESRKCIELKEYHSINKVYKQIYGENALNLLPKYYDTIAYGLTIFKDDKDILEYLQNKYVNAKGKPISNFANKTYDDTFIQALLNLNFTKMGHLSFKALKNIIPFLEEGLSYDKACEKAGYNFKGTSYTEQTKYLPVIPQNTNPVVHRALSQTRKVINAIIKKYGSPNAIHIETARELSKTFQERKEIDSMYQDNSKKNEHAIHKLKELGNINPSGINIVKFKLWNEQDGRCMYSGKYIEPHRLFEEGYTEVDHILPYSRSLDDSYNNKTLTLGTENQRKGNKIPYEYMGNTSIWNDFETRVQSNKKINKKKQQKLLLQHFSYAREQEFIERNLNDTRYATIYLSSLIQQHLIFSESSRKKKVHTVSGIITSHLRSRWGFNKDRKEGHIHHALDAVIVAVTSDHMIQRVTKYYKLKELNRNLQAKRMPFPEPWEGFRLELEARISPNTQQYLKGLRFKNYADVNLSEIKSIFVSRMPKHSITGELHQETIRKFIGYNEKGKVLTAIKTKLEDIPFDANGDFPMYGKESDLYTYNAIKERYLSHKKDKRKSFQEPLYKPTKSGGIGPLIKSIKIMDTRTIVNPVNQGKGVVYNSKIARTDVFKKEEKYYLIPIYTIDLMKNILPQKAITAGKGYEDWTTIDPSFTFLFSLFPNDLIQIVPSKNKTIKARTTVSKKEVLLPSLTGYFKGVHSGTAGITVETHDGSVIANVGSKQLLLIEKYQVDVLGNYTKIKEEKRIGLTTYNDNKKIAAC

SEQ ID NO: 286 - protein, 1088 aa, Bacillus smithii
MNYKMGLDIGIASVGWAVINLDLKRIEDLGVRIFDKAEHPQNGESLALPRRIARSARRRLRRRKHRLERIRRLLVSENVLTKEEMNLLFKQKKQIDVWQLRVDALERKLNNDELARVLLHLAKRRGFKSNRKSERNSKESSEFLKNIEENQSILAQYRSVGEMIVKDSKFAYHKRNKLDSYSNMIARDDLEREIKLIFEKQREFNNPVCTERLEEKYLNIWSSQRPFASKEDIEKKVGFCTFEPKEKRAPKATYTFQSFIVWEHINKLRLVSPDETRALTEIERNLLYKQAFSKNKMTYYDIRKLLNLSDDIHFKGLLYDPKSSLKQIENIRFLELDSYHKIRKCIENVYGKDGIRMFNETDIDTFGYALTIFKDDEDIVAYLQNEYITKNGKRVSNLANKVYDKSLIDELLNLSFSKFAHLSMKAIRNILPYMEQGEIYSKACELAGYNFTGPKKKEKALLLPVIPNIANPVVMRALTQSRKVVNAIIKKYGSPVSIHIELARDLSHSFDERKKIQKDQTENRKKNETAIKQLIEYELTKNPTGLDIVKFKLWSEQQGRCMYSLKPIELERLLEPGYVEVDHILPYSRSLDDSYANKVLVLTKENREKGNHTPVEYLGLGSERWKKFEKFVLANKQFSKKKKQNLLRLRYEETEEKEFKERNLNDTRYISKFFANFIKEHLKFADGDGGQKVYTINGKITAHLRSRWDFNKNREESDLHHAVDAVIVACATQGMIKKITEFYKAREQNKESAKKKEPIFPQPWPHFADELKARLSKFPQESIEAFALGNYDRKKLESLRPVFVSRMPKRSVTGAAHQETLRRCVGIDEQSGKIQTAVKTKLSDIKLDKDGHFPMYQKESDPRTYEAIRQRLLEHNNDPKKAFQEPLYKPKKNGEPGPVIRTVKIIDTKNKVVHLDGSKTVAYNSNIVRTDVFEKDGKYYCVPVYTMDIMKGTLPNKAIEANKPYSEWKEMTEEYTFQFSLFPNDLVRIVLPREKTIKTSTNEEIIIKDIFAYYKTIDSATGGLELISHDRNFSLRGVGSKTLKRFEKYQVDVLGNIHKVKGEKRVGLAAPTNQKKGKTVDSLQSVSD

SEQ ID NO: 287 - protein, 1069 aa, Bacillus thuringiensis
MNYDIGLRIGITSCGWSIINKDLERIEDLGVRVFEKAENPDGTASAAPRREARKSRRKHRRKKHRIERIKRLIVQHDLLSKKELDSLYLSPFNIDVWNLRVEALERKLDNREFARVLIHLVQRRGFQTIRKSVEIQEEGKLLENVSENERIMKVNGYKTVGEMFSKHEKFTHHKRNKDGSYTSVVTRSLLLKEIKTIFNSQRILGNVFSTQKLESDYLYIWGSQRPTLTYEQLMSMVGNCIYEKKEKRAPKTSWAFQYFSLLQKINKLKVSDDNTLRKLSKEERDIVIELAFKKKNVSFVDIRKALKLNDNTKFNHLTYSHVVETKKVEKATFIELKGYHLIKKQLKDRNVELTQELQPKDYDAIAAASTFFKNDIEFRDYLRNQYLDSNGKRKSNIANKVFEDKVIAAVFELNFSKVCHLSFKSLYKLIPHLEKGLDYKEAILCAGYNFRDENKRDKKLFLPVIQQETNPVVHRALTQARKVINAIIREYGSPNTIRFVVANDLAKTYKQRKELESTLKKNRAENEKIKTKLLSMGIINPTGMDIVKYKLWYEQSGICLYTGRQMELSSLFKPGYSIVNHIIPYNRSFDDTYHNRVLTLTETKYEKGNKIPFEYFGAEETCWNEYEKRVSTSKKIHDKKREKLLIRNFDIEYENEMISNNVFDTHYIGSYFEKYIDEHLQFKKSTKKQKVFSIHGNMVAHLHSRWGFNKNSREIYLNHAVDAAIVAVLTDQLIRNIADYYRRDNILEQKGSLKFPEPWKSFSIELEARISPQVRDLIKKLNLDSYLDVDILHIKPVFISKKPRRKVNGEAHKSTIRSLIGINEIGKTVTCIKTRLEDIPFDENGDFPMYGKDTDKYTYTAIKERYLEFNKDKEKAFSTPLYKLKRNGEPGNQIKSVKIIDTRNIVNKVNQGKGIAYNSNIIRVDVFSRDQKYYVVPIYLRDFIKGSLPNKIITAAKGFMQWPETDNSYTFLFSIFPNDLIKVVPKEGKFIKAKNENKENINLTEILGYFKGLDSSTGAFTLESHDGSLLARGIGTKNLLLIEKYQVDVLGRYNKVGNEERQDIKIQQN

SEQ ID NO: 288 - protein, 206 aa, Bacteroides cellulosilyticus
MKKILGLDLGCNSIGWALVNEAENTEEISSIIKLGVRVNPLTVDEMQNFEKGKSITTNADRTLKRSMRRNLQRYKLRRDTLIEVLKEHGFITDSTLLSEHGNKTTFETYRLRAKAAVEEISLEKFARVLLMINKKRGYKSSRKAKGSEDGVLIDGMDVARKLYEEGLTPGELCLQILEAGKKNLPDFYRSDLQNEFDRIWNFQKLV

SEQ ID NO: 289 - protein, 349 aa, Bacteroides coprosuis
MKKILGLDIGTNSVGWAVVNTNQEGEPSQIEKLGSRIIPMSQDILDKFGQGQTVSSTASRTDYRGIRRLRERSLLRRERLHRVLHILDFLPKHYADSIGWDPRNSKTYGKFLPGTEVKLAWVPTADGHQFLFYSTYLEMLEDLKQTQAQLFETSQTPVPLDWTIYYLRKKALTQPITKHELAWLLLHFNTKRGYYQRRGELEDTPTDKLVEYHALKVVDVEVDPEDQSKKPWYFVHLENGWIYKRQSSEPLDNWKGLVKEFIVTTHLDKEGKPKLDKEGEVRRSFSSPKEDDWTLVKKKTENDLEKSGLTVGAYIYQTLLNKPNQKIRGGLIKHIERNYYVEELEQILR

SEQ ID NO: 290 - protein, 1504 aa, Bacteroides coprosuis
MKKVLGLDIGTNSVGWAVVNQNDKGEFLSIEKIGSRIIPMSQDVMDKFGAGQTESSTAQRTQYRGVRRLRERSLLRRERLHRVLHILHFLPQHYDAAIGWNKKENKTYGKFLPGVEVNIPWVATDQGHQFIFMDSYAEMLKDLKQHQPHLFEKSSTPVPLDWTIYYLRKKALTQAISKEELAWILLNFNQKRGYYQLRGEEVEDNTKREEFYALKVVKVELDKDNTSAKTWYKVHLENGFIYPCPSDTPIDSWVGMVKDFIVTTTLEKDGSEKRTADGEIKRSFRAPKEDDWTLLKKKTESELEKSGKQVGAFIYDTLLSNPDQKIIGGLIKTIERKYYKKELEQILETQQKFIAELSDKKLFQACAEELYPLNDSHRENLLERDFKHLFVQDIIFYHRPLKTKKSLISNCTYEYRTFYKNGEKQISPIKCIAKSNPLFQEFRVWQFVQNLRILQRQRSEGDSIKYNVDVTAEFLKDENDIANLFTWLNERKVIKQDQLLKSYFKLKVNKETKELDYRWNYVDDKNKEYPCNATRTHILSFLEKCKEEKRIEDDRFVYSLWHLLYSVVEPIELRGALAKFAEREHLHPSFVDVFAQFPPLEKEYGSYSEKAIKRLLPLMRMGDYWHEDKIDVKTKQRIQRIIDGEADDDITHRSREKVENLRSITDFKGLPLWKAGYVVYNRHSESGELTKWKTPHELSNYIQNEFKQYSLRNPIVEQIVLETLRVVHDLWVKHGDFSEIHLELGRDIKNSSDKRKRMAERQQENENSRQRVLEMLIDLKKEAAFADLNPYSPSQQEKLRIVEDGVLRSNIEIPKDIEKITKSAKPTSRELTKYRLWLDQKYRSPYTGQPISLAQLFTSKYEIEHVIPQAKYFDDSFTNKVICESEVNKEKGSMLAHEFILKNGGSTVNVGGRQVQVLKNDAYVELINRLYGKNNPVKAKKLLAEDIDEVVGDFSERQLNDTRYISRVVQKLLSNIVREEDEQESTSKHVIGCSGQVTTALKKDWGLNDIWNKIIQPRFERLNEMTATEDYGVWQSPNHFQIRVPEEIQKGFTKKRIDHRHHAMDALVIACATRSHINYISNRSGQDRNAKFETTRTDLRSKLCYKENSSGNNYNYIFNKPWDTFTQDAHRALENIVVSHKQNLRVLTKTNNYTQFINKDGKKDLQKQVKGDHFAVRKPMHQETIYGRVSIRSIKEVALKKALENWKQIVDRTLKDKIRELIGAYGKYDAQTILKYFKDRDYKFNNLKINRVEVYEYDHNCAAVRKSIGDDLTIKQIERITDESIRKILMNHLSNYDDNLKEAFSPEGLMEMNKNIKELNGGKNHQPIYKVRLFEDLGSKFPLGVSHNNPDKYAIAAKGTNLFFGIYEDQEGKRMFDSIPLNIVIDRLKEKKSPVPETYNESKLKFHLSPNDLVYVPTDEEQKQPELVDVDHLSDEQKGRVYKAVSFTGNRAFFVNHRVSKVIHDYVEFGTKNKIENDDDKRSLKHICWKLKVNRLGEITDVKR

SEQ ID NO: 291 - protein, 1509 aa, Bacteroides eggerthii
MKTILGLDLGTNSVGWAVINSVIKEQAERIWIEMAGSRIIPMDAAVLGDFDKGNSISQTSERTRLRGARRLRERQLLRRERLHKVLNILGFLPNHYLEYIDFEKHPGKFLADAEPKLAWVKDEQGKYTFLFQAAFDEMLADFAIHQPSLVSGDKKIPYDWTIYYLRKKALTEMISKEELAWILLNFNQKRGYYQLRGEEEEDNAGKSVEFYALKVLTVEATDEKKGRDVWYNVHLENGWIYRRSSSVPLDWEGQVKEFIVTTDLNPDGTPKLDKYGEVKRSFRAPKEDDWMLIKKRTEADIANTHKTVGAYIYDTLLQKPQQKIIGKLVKTVERKLYRDELSLILQKQCAFHAELQDRALYARCVEALYPSNEVRRKNIANRDFVYLLMDDILFYQRPLKTKKSLIANCPYEENEYVDRETGEIKKTPLKCIAKSHPLFQEFRLWNFLSNIRIYQKEKEINGTLHLDVDVTAEFLKTEDDYVALFDWLNSRKEIEQKTFLKYPKFGLKKEISNYRWNYVEDKQYPCNETRHAILSSLEKANVCIDFLSNEKEVALWHILYSVSDKQEIEKALRTFAAKNGLDESFVEAFKKFPPFKSEYGAYSAKAIKKMLPLMRCGKYWDVSSIDDTTKERIKKIVTGEYDERISVKVRDKVMNLSDISCFRRLPLWLACYIVYNRHSEDKEAVKWESPADIDAYLASFKQHSLRNPIVEQVITETLRVVRDIWKQVGRIDEIHIELGREMKNPADKRKRMTAQILENENANLRIKALLAEFMNPEYEIENVRPYSPSQQEILRIYEDTVLHAEDQLPEEIDAILKKFNSSKVPTKSEFLRYKLWLEQKYRSPYTGELIPLGKLFTAAYEIEHVIPQSRYFDDSFSNKVICESAVNKLKDNQLGYEFIKNHHGQKVEVGFGKSVEIFSVDSYERFVKEQYAKSAVKMKKLLMDDIPEQFIERQLNDSRYISKVIKGLLSNIVREKNDSGEYEPEAVSKNIVVCTGSVTDRLKRDWGMNDVWNSIVYPRFERLNSLTDTQSFGHWENKSGKKVFQTELPLEYQKGFSKKRIDHRHHAMDAIVIACATRNHVNYLSNESASRNAKISRYDLQRLLCDKNRTDDNGNYKWVIKKPWDTFTQDAREVLSKIVVSLKQNLRIINKTTNVYRHLDATGNRVYEKQKTGDSWAIRKPMHKDTVFGAVNLRKVKVVRLSVALDTPAMIVDKRVKNKVFELLSYKYDKKRIEKYFKENAFLWKELDLAKVAVYYFTEATTEPLVAVRKPLDSTFNEKKIKESVTDTGIQKILLNHLCTKEGKPDLAFSAEGIEEMNRNLLQLNNGKSHQPIYKVRVYEPRGNKFSVGVLGNKGTKWVEAAKGTNLFFAIYITEDGKRTYETIPLNVVIEREKQGLVPVPDRNKKGDKLLFWLSPNDLVYLPTEEEREFGRINEPIDRGRIYKMVSCTGNEGHFIPANVANPIVPVIELGSNNKAQRAWTNEMIKDICIPIKVDRLGHIIEVKYRIDE

SEQ ID NO: 292 - protein, 1526 aa, Bacteroides faecis
MKKILGLDLGTNSIGWAVLNAADDNSLKYIEAAGSRIIPMDAAILGDFDRGNSISQTAERTRIRGMRHLRERYLLRRARLHRILNLLGFLPFHYAQDIDRYGNFSADMEPKIAWCKNLEGELEFIFIESFNEMLEDFRKNQPELVADNKKVPYDWVIYYLRKKALEKKISKEELAWILLNFNQKRGYYQLRGEDDDESMKTAKTRQYFDKQIIKNIIDTNQTYKGQRILIVELQNGDKGKIFKKEIPDWIGQEKNIIVTVDIDKDGNDKYEESGSLSCRFKIPTDAEWESEWKLIKMKTQKDLDESNKTVGTYIYDSILQNPTQKVRGKLVRTIERKYYKAELKQILEKQTEFHSELQDKDLYIECLNELYSNNDTHRNAITDRDFVYLFMNDILFYQRPLKSKKSLIDNCPYERNIYIDKETGEIKYSPIKCIAKSHPLFQEFRLWKFISSIRIYQRESVVEVVDKQLDLFSSQSTSVQKLVTDVDVTDKFLTCENDYVALFEWLNKKKIIDQKEFLKYRPFGLKGDIDNYRWNYVEDKSYPCNETHAMILTYFAKAGISEDILTKEMEEALWHILYSVEDRQEITKALRTFASKYHLSDSFVKVFSNIPPFKKEYGSYSAKAIKKLLSLMRMGKYWSEDAIDVNTRERIDKIVTGEYDEKIRDRVREKTIRLNDIRHFRALPDWLACYVVYDRHSETREITEWKSPEEIDEYIRNFKQHSLRNPIVEQVITETLRTVRDIWKQVGCIDEIHVELGREMKNPADKRKRITSQIIENENANLRVKALLTEFVNSEFEIENVRPYSLSQQDILRIYEDGVLNSVAEVPGDIAGILKKFNENDAKKRPTTSEILRYKLWLEQKYRSPYTGEMIPLSKLFTSAYEIEHVIPQSRYFDDSFSNKVICEAEVNKLKDNALGYEFIKKHHGEKVELGFGKIVEIFSVSVYEQFVKDNYSRNRGKMKKLLMDEIPEQFIERQLNDSRYISKVVKTLLSNVVREKAEQEAVSKNVIVCTGGVTDRLKKDWGINDVWNKIVLPRFLRLNELTNSTNFTAKNAAGNEIPAMPLELQKGFNKKRIDHRHHAMDAIVIACANRNIVNYLNNESASRKAKISRHDLQAILCDKVRTDDKGNYQWRVKKPWDTFTQDVYVALENIIVSFKQNLRVINKTSNYYWHYENGKKVLVKQVKGDSWAIRKPMHKDTVFGEVNLRKVKSVSLNEALKNPQFIVEKDLKRQLLSLLQQNFDIKKIKKYFEEHKDIWSDISLSKMNIYYFTKETKDRYFATRKPLDASFDKKKIESCITDTGIQQILLRHLELKENDPERAFSPDGIDEMNRNIIQLNKGKGHHPIAKVRVYEKADKFEVGQRGNKSSKFVEAAKGTNLFFAVYETEYPDEKTNSIVRKRNYATIPLNIAIERQKRGLSTAPEDEKGNVPSFVLSPNDLVYLPTSEDIVNGHITQPIDKSRIYKMVSSSGSQCFFIKHNIANIIVDKYEFSPLNKMERAISNEMIKEICIPVKVDRLGNIVKLGKSE

SEQ ID NO: 293 - protein, 1509 aa, Bacteroides fluxus
MKTILGLDLGTNSVGWAVINSVIKEQAERIWIEMAGSRIIPMDAAVLGDFDKGNSISQTSERTRLRGVRRLRERQLLRRERLHKVLNILGFLPNHYLEYIDFEKHPGKFLSDAEPKLPWVKDEQGKYTFLFQAAFDEMLADFAIHQPSLVSGDKKIPYDWTIYYLRKKALTEMISKEELAWILLNFNQKRGYYQLRGEEEEDNAGKSVEFYALKVLTVEATDEKKGRDVWYNVHLENGWIYRRSSSVPLDWEGQIKEFIVTTDLNPDSTPKLDKYGEVKRSFRAPKEDDWMLIKKRTEADIANTHKTVGAYIYDTLLQKPQQKIIGKLVKTVERKLYRDELSLILQKQCAFHAELQDRTLYARCVEALYPNNEVQRRNIANRDFVYLLMDDVLFYQRPLKTKKSLIANCPYEENEYVDRETGEIKKAPLKCIAKSHPLFQEFRLWNFLSNIRIYQKEKEINGTLHLDVDVTAEFLKTEDDYVALFDWLNSRKEIEQKTFLKYPKFGLKKEISNYRWNYVEDKQYPCNETRHAILSRLEKANVCIDFLSNEKEVALWHILYSVSDKQEIEKALRTFAAKNGLDESFVEAFKKFPPFKSEYGAYSAKAIKKLLPLMRCGKYWDVSSIDDTTKERIKKIVAGEYDERIAVKVRDKVMNLSDISCFKRLPLWLACYIVYNRHSEDKEAVKWESPADIDAYLASFKQHSLRNPIVEQVITETLRVVRDIWKQVGRIDEIHIELGREMKNPADKRKRMTAQILENENANLRIKALLAEFMNPEYEIENVRPYSPSQQEILRIYEDMVLHAEDQLPEEIDAILKKFNSSKVPTKSEFLRYKLWLEQKYRSPYTGELIPLGKLFTAAYEIEHVIPQSRYFDDSFSNKVICESAVNKLKDNQLGYEFIKNHHGQKVEVGFGKSVEIFSVDSYERFVKEQYAKSAVKMKKMLMDDIPEQFIERQLNDSRYISKVIKGLLSNIVREKNDSGEYEPEAVSKNIVVCTGSVTDRLKRDWGMNDVWNSIVYPRFERLNSLTDTQSFGHWENKSGKKVFQTELPLEYQKGFSKKRIDHRHHAMDAIVIACATRNHVNYLSNESASRNAKISRYDLQRLLCDKSRTDDNGNYKWVIKKPWDTFTQDAREVLSKIVVSLKQNLRIINKTTNVYRHLDATGNRVYEKQKTGDSWAIRKPMHKDTVFGAVNLRKVKVVRLSVALDAPTMIVDKRVKNKVFELLSYKYDKKRIEKYFKENAVLWKELDLARVAVYYFTEATTEPLVAVRKPLDSTFNEKKIKESVTDTGIQKILLNHLCTKEGKPDLAFSAEGIEEMNRNLLQLNNGKRHQPIYKVRVYEPRGNKFSVGVLGNKGTKWVEAAKGTNLFFAIYITEDGKRTYETIPLNMVIEREKQGLAPVPDKNEKGDKLLFWLSPNDLVYLPTEEELEFGRINEPIDRGRIYKMVSSSGNQCFFIPQSISNAIIPTKELGANNKAERSWDGAMIKNICIPVKVDRLGRIIEVKYRINE

SEQ ID NO: 294 - protein, 1436 aa, Bacteroides fragilis; identical to SEQ ID NO: 160

SEQ ID NO: 295 - protein, 1512 aa, Bacteroides nordii
MKNILGLDLGTNSIGWAVINSEEDGPIVKKRIELAGSRIIPMDAAVLGNFDSGVTKSQTAERTSFRSIRRLRERQLLRRERLHKVLQILGFLPEHYVNDIDFENHPGKIKRNTEPKLPWRKNSMGQFEFIFQDSFEAMLTDFATHQPVFVSEGKKVPYDWTLYYLRKKALTEGISKEELAWLILNFNQKRGYYQLRGEEEEEQSNKLVEFYALRVVKVEATDDKKGKDTWYNVHLENGWIYRRTSNIPLDWEGKVKEFIVTTDLNEDGTPKLDKYGEVKRSFRAPKEDDWTLIKKKTESDIANSHKTVGCYIYDALLQNPHQKIKGRLVRTVERKFYKEELRLILEKQLSFHPELQDRDLYRACIDALYVSNEAHKNNISGRDFVYLFIDDIIFYQRPLKTKKSLIDNCPYEENQYMDRETGEVKQAPIKCIAKSHPLFQEFRLWQFISNIRIYQRERVLDDGKLETDVDVTPDFLKTEDDYTTLFEWFNDRKEVDQKAFLKNPQFGLKKTFTEYRWNYVEDKSYPCNETRNAILNGLQKAGVSADFLSREVEEALWHILYSVEDKIEIESALRKFASKHDLDDRFADVFKKLPPFKKEYGAYSAKAIKKLLPLMRIGKYWELSNIDDKTKERIDKIITGEWDENIHDRVREKAIKLSDITDFKGLPLWLSCYVVYNRHSEARAIAKWESPEDIDSYLRLFRQHSLRNPIVEQVITETLRTVRDIWKRVGQIDEIHVELGREIKNPADKRAKMTAQIVENENTNLRIKALLAEFINSEYEIENVRPYSSNQQEKLKIYEDTVLNGVKEIPEDINTILKKFRESDLKKRPTKSDFLHYKLWLEQKYCSPYTGRIIPLGKLFTSAYEIEHIIPQAHYFDDSFSNKVICEAEVNGLKDKKLGYEFIKHNPGKMVEIGFGKPPVRIFSVEEYERFVKENYSGIKNKMNKLLMDDIPETFIERQLNDSRYISKVVKSLLSNIVREKDSNGEYEPEAISKNVIVCTGSVTDRLKRDWGVNDVWNSIIYPRFERLNELTGSQQFGCWENKEGKRVFQTAVPLEMQKGFSKKRIDHRHHAMDAIVIACATRNHINYLSNESASKKAKISRTDLQRLLCTKCRTDDNGNYKWIVKKPWPAFTQDIRKALENITVSFKQNLRVINKTTNYYVHFDESGKKVLEKQINGDSWAIRKPMHKDTVFGKVNLQKVKEVRLSLALDTPKMIVDKKLKEKVLQLYSYKYDKKRIDKYFKENASLWKDLNLSKVAVYYFTNDSTEPLVAVRKPLDTSFNAKKIKESVTDTGIQKILLNHLSNNQDDPNLAFSPDGIDKMNKNLTALNDGKYHQPIYKVRVCEPQGNKFSVGTSGNKTSKYVEAAKGTNLFFAVYQTEDGKRSYETIPLNVVIEREKLGWTPVPENNNNGDKLLFWLSPNDLVYVPTADELNNGMRLDNMDKGRIYKMISCSGPQCFFIPQNVSNAIIPVIELGANNKAEKSWNNEMIKVVCVPIRVDRLGCITQINNQK

SEQ ID NO: 296 - protein, 779 aa, Bacteroides oleiciplenus
MKEGNQYDVACEYAGYRHSKSSLTREEIDNKVLKNRLEILPKNSLRNPVVEKILNQMVNVVNAVIDTYGKPDEIRVELARELKKGAKEREELAKSIAQNTREHEAIRQLLQTEFGMMHVTRNDIIRYKLYEELKDNGYKTLYSDQYIPREKVFSKEIDIEHIIPQARLFDDSLSNKTLEYRAVNIEKGNKTAYDFVKEKYGNDGLRRYLNHCEALFKDKKTKLKKLKMEDQDIPDGFIDRDLRNTQYIAKKALSMLSEISRRVVATTGSITDELRKDWQLVDIMKELNLPKYEALGFVETFKDKDGRIIKKIKDWSKRNDHRHHAMDALTVAFTKDVFIQYFNNKNAFWMSGSKEHANITAIKNKYFEKGKALAPIPLELFRTEAKHHLENILVSIKAKNKVVTNNINRTKKKNGENLKLQQTPRGQLHLESIYGSYRQCIIRDEKVNASFDASKIANVSKSAYRNALLKRLEAYDNDPKKAFTGKNSLDKNPVYLDENKMEKVPDRVKIVEFETVYTIRKPIDPKLSIDKVVDARIRTLLKKRLEEYGGDAQRAFSNIEENPIWLNKEKGISVKRVAIRGISNAQALHDKKDKDGNPILDKEGKGIPTDFVNTSNNHHVAIYRKPVVDKMGQVILDENGSPRYELGEDVISFFEAVARVNLRQPVVDKDYKRSEGWQFLFSMKQNEYFVFPNEKTGFNPKEIDLLNPENYALISPNLFRVQKIGLNDYTFRHHLETSIQNNSNELKFITWIRCGKNGINGVIKVRVNHIGQIVSMGEY

SEQ ID NO: 297 - protein, 653 aa, Bacteroides oleiciplenus
MKKILGLDLGSSSIGWALVNEGANDEEKSSIIKLGVRVNPLTVDEAQNFEKGKSITTNADRTLKRGMRRNLQRYKQRREALVEVLKKHEFITAGTLMSEQGNKTTFETYRLRAKAVEEEISLEEFARVLLMINKKRGYKSSRKAKGDEDGVLIDGMDVAKKLYDEDLNPGELCLQLLEAGKKTLPDFYRSDLQDEFDKIWNFQKQFNPESFCDTAKEEVRGKNRTQTWTILSKYFVWTEGDSVWNNEEARTEERIKEYKLVGIKRTTKGYEQKLENYRWRVQALSEQLNPEIIAIVLQEINGQISASSGYLGAISDRSKELFFNHQTVGQSLMSELDKNPNGSLRNKVFYRQDYLDEFNTIWEKQSLYHKELTVELKKEIRDIIIFYQRRLKSQKGLISTCEFEQREIIVEKDGKRKTKIIGCKVIPRSHPLFQEFKIWQTLNDVEVYVADRRTKRKQDRKSTTLFSDTEDILLVEGKRYLYQEEKELLAKELFVRENMKKAEVLKLLFEDPKELDLNFKQIDGNRTGFALFSAYSKMIEKYGYESVNFKNSADEIIEKLQIIFADLGWNTELFSIDLSKDDKELEKQPYFRLWHLLYSFEGDNTPTGNGKLIEALMRLCSVEKEYASVLANVSFQEDYGSLSAKAIKKYYLI

SEQ ID NO: 298 - protein, 1436 aa, Bacteroides sp.
MKRILGLDLGTNSIGWALVDEAENKDERSSIVKLGVRVNPLTVDELTNFEKGKSITTNADRTLKRGMRRNLQRYKLRRETLMEVLKEHKLITEDTILSENGNRTTFETYRLRAKAATEKISLEEFARVLLMINKKRGYKSCRKAKGAEEGTLIDGMDIARELYNNNLTPGELCLQLLDAGKKYLPDFYRSDLQNELDRIWEKQKEYYPEILTEVLKEELRGKKRDAVWAICAKSFVWEEYYTEWNKEKGKTEQQEREHKLEGIYSKRKRDEAKRENLQWRVNGLKEKLSLEQLVIVLQEMNIQINNSSGYLGAISDRSKELYFNKQTVGQYQMEMLDKNPNASLRNMVFYRQDYLDEFNTLWEKQAEYHKELTGELKKEIRDIVIFYQRRLKSQKGLVGFCEFESRQIEVEIDGKKKIKTVGNRVIPRSSPLFQEFKIWQILNNIEVTVVGKKGKRRKQKDNSPTLFDGLDDTEQLELNGSRYLYQEEKELLAQELFVRDKMTKSDVLKLLFDNPQELDLNFKTIDGNKTGYTLFQAYSKMIEMSGHEPVDFKKTVEKVVEHVKAVFDLLNWNTDILGFNSNEELDNQSYYKLWHLLYSFEGDNTPTGNARLVQKITELYGFEKEYAIILANVTFQDDYGSLSAKAIHKILPHLKEGNRYDVACAYAGYKHSESSLTKEEIANKALKDRLTLLPKNNLRNPVVEKILNQMVNVINAIIDTYGKPDEIRVELARELKKNAKEREELTKFIAETTRKHEEFKILLQSEFGLTNVSRTDILRYKLYKELESCGYKTLYSNTYIPREKLFSKEFDIEHIIPQARLFDDSFSNKTLEARSINLEKGNKTAYDFVKEKFGESGADNSLDHYLNNIEDLFKSGKISKTKYNKLKMAEQDIPDGFINRDLRNTQYIAKKALSMLNEISRRVVATSGTITDKLRQDWQLVDVMKELNWEKYKALGLVEYFEDKDGRQIGRIKDWTKRNDHRHHAMDALTVAFTKDIFIQYFNNKNASLNSNTNEYAIKNKYFQNGRAIAPIPLREFRVEAKKHLENTLISIKAKNKVVTGNINKTKKRGGVNKYLQQTPRGQLHLETIYGSGKQYLTKEEKVNASFDMKKIATVSKSAYRDVLLKRLHENDNDPKKAFTGKNSLDKQPIWLDKEQTRKVPEKVKTVTLETIYTVRKEISPDLKVDKVIDAGVRKILTGRLNEYGNDAKKAFSNLDENPIWLNKEKGISIKRVTISGISNAQSLHVKKDKDGKPILDEDSRNIPVDFVNTGNNHHVAVYRRPVIDKRGQLVIDEAGNPKYELEEVVVSFFEAVTRANLGQPIIDKDYKTSEGWQFLFSMKQNEYFVFPNEKTGFNPKEIDLLDAENYGVISPNLFRVQKFAHKNYVFRHHLETTIKDTSSILKGITWIDFRSSKGLDAIVKVRVNHIGQIVSVGEY

SEQ ID NO: 299 - protein, 1510 aa, Bacteroides sp.
MKRILGLDLGTNSIGWALVDSEEQRILGMGSRIIPMDQGVLDTFSGGNPVETQTAARTAYRGTRRLRERALLRRERLIRVLNMMKFLPEHYASQIDFEKRLGQFFDEKEPKLAWKQNDEGRFEFIFQQSFNEMIEEFKNKGVVREDKKIPYDWTIYYLRKKALSQEIEKEELAWILLNFNQKRGYYQLRGEEEEENPNKLVEYYSLKIVDVIADEKPNSKGDIWYSLHLENGWIYRRSSKIPLFGWKDKTRDFIVTTDLNDDGTVKKDKEGIEKRSFRAPSENDWVLLKKKTESDIEKSHKTVGAYVYETLLQNPMQKVRGKLVRTIERKFYKDELKQILEKQREFHPELRDEDLYNDCVRELYRSNETYQFILSKRDFVHLFLDDILFYQRPLRSQKSAIGDCILEFKTYKDKDGNNIKEYLKVISKSNPLYQEFRIWQWLYNLKIYRKEDDEDVTLQFIANIEDKEQLFDFLSNRKSIEQKPLLEYLIKAKGLKKQVKTEAYRWNYVEDKIYPCSETKTMISTRLAKVENIPDNFFTKEIEQKLWHIIYSVTDKNEFEKALRTFAKKYDLDIASFVDNFKKIPPFKNEYGSFSEKAIKKLLPLMRLGKYWKWNDIDNNTQNRISKIITGEYDEEIKDIVREKSIALTNENDFQGLQLWLAQYLVYGRHSEADIAGKWHSVADLEKYLNEFKQHSLRNPIVEQIITETLRVVRDIWRKYGQGAENFFSEIHVELGRDMKNTADERKKIVNVVTENENTNLRIKALLMELKNNSDGKLEVENVRPYSPTQQDILKIYEEYAISTGLDNEKDEKVKEDIKKISRVAQPTTTELQRYKLWLEQKYCSPYTGKVIPLGKLFTEEYQIEHIIPKSRYYDDSFSNKVICEAAVNKLKDKCLGLEFIKNYHGQIVETGFGQKVTIFDEEAYQNFVKQHYAYNRSKRTKLLLEEIPEKMIERQMNDTRYISKFVLPLLSNLVRAEENDNGVNSKNVLPVNGKITTMLKQDWGLNDVWNDLILPRFVRMNELAKTIAFTSWNEQHQKYLPTVPLELSKGFQKKRIDHRHHAMDALVIACATRDHVNLLNNKHANTDTIRYDLQRKLRLFERVTYIDPQTKNNVTKDIPKEFKKPWDNFTVDARNELEKIIVSFKQNLRIINKATNIYTKYENGKKIKVGQKGLNWAIRKPLHKETVFAKVSLRKRKTVRLSEALKDWKKIVDKKLKQEIKRLTCQYGKFDVDTILRYFKDRKYQFGEVDVSKVKMYYFDEENAAVRKNVDTSFTEKFIQGSVTDTGIQKILLNHLEAKGNKVEIAFSPEGIEEMNKNIIQLNEGKLHLPIFKVRVYETIGNKFSVGVKGNKKDKYVEAAKGTNLFFAIYVDENGIRSYETIPLNIVIERLKQGLSVVPEKNRKEHSLLFYLSPNDLVYVPIEDERENIHAVNLDQLNNEQRKRIYKMVSCTGSECHFVPYYVASPIVNKVEYSSLNKIGRSLTGEMIKDVCIKLKVDRLGNVKGISGL

SEQ ID NO: 300 - protein, 1436 aa, Bacteroides sp.
MKRILGLDLGTNSIGWALVNEAENKDERSSIVKLGVRVNPLTVDELTNFEKGKSITTNADRTLKRGMRRNLQRYKLRRETLTEVLKEHKLITEDTILSENGNRTTFETYRLRAKAVTEEISLEEFARVLLMINKKRGYKSSRKAKGVEEGTLIDGMDIARELYNNNLTPGELCLQLLDAGKKFLPDFYRSDLQNELDRIWEKQKEYYPEILTDVLKEELRGKKRDAVWAICAKYFVWKETYTEWNKEKGKTEQQEREHKLEGIYSKRKRDEAKRENLQWRVNGLKEKLSLEQLVIVFQEMNTQINNSSGYLGAISDRSKELYFNKQTVGQYQMEMLDKNPNASLRNMVFYRQDYLDEFNMLWEKQAVYHKELTEELKKEIRDIIIFYQRRLKSQKGLIGFCEFESRQIEVDIDGKKKIKTVGNRVISRSSPLFQEFKIWQILNNIEVTVVGKKRKRRKLKENYSAIFEELNDAEQLELNGSRRLCQEEKELLAQELFVRDKMTKSEVLKLLFDNPQELDLNFKTIDGNKTGYALFQAYSKMIEMSGHEPVDFKKPVEKVVEYIKAVFDLLNWNTDILGFNSNEELDNQSYYKLWHLLYSFEGDNTPTGNGRLIQKMTELYGFEKEYATILANVSFQDDYGSLSAKAIHKILPHLKEGNRYDVACVYAGYRHSESSLTREEIANKVLKDRLMLLPKNSLHNPVVEKILNQMVNVINVIIDIYGKPDEIRVELARELKKNAKEREELTKSIAQTTKANEEYKTLLQTEFGLTNVSRTDILRYKLYKELESCGYKTLYSNTYISREKLFSKEFDIEHIIPQARLFDDSFSNKTLEARSVNIEKGNKTAYDFVKEKFGESGADNSLEHYLNNIEDLFKSGKISKTKYNKLKMAEQDIPDGFIERDLRNTQYIAKKALSMLNEISHRVVATSGSVTDKLREDWQLIDVMKELNWEKYKALGLVEYFEDRDGRQIGRIKDWTKRNDHRHHAMDALTVAFTKDVFIQYFNNKNASLDPNANEHAIKNKYFQNGRAIAPMPLREFRAEAKKHLENTLISIKAKNKVITGNINKTRKKGGVNKNMQQTPRGQLHLETIYGSGKQYLTKEEKVNASFDMRKIETVSKSAYRDALLKRLYENDNDPKKAFAGKNSLDKQPIWLDKEQMRKVPEKVKIVTLEAIYTIRKEISPDLKVDKVIDVGVRKILIDRLNEYGNDAKKAFSNLDKNPIWLNKEKGISIKRVTISGISNAQSLHVKKDKDGKPILDENGRNIPVDFVNTGNNHHVAVYYRPVIDKRGQLVVDEAGNPKYELEEVVVSFFEAVTRANLGLPIIDKDYKTTEGWQFLFSMKQNEYFVFPNEKIGFNPKEIDLLDVENYGLISPNLFRVQKFSLKNYVFRHHLETTIKDTSSILRGITWIDFRSSKGLDTIVKVRVNHIGQIVSVGEY

SEQ ID NO: 301 - protein, 1424 aa, Bacteroides sp.
MKRILGLDLGTNSIGWALVNEAETDEEVSSIIRLGVRVNPLTVDETQNFEKGKSITTNAERTLKRSMRRNLQRYKLRRDALVEFLKELGFITDETILSEQGNRTTFETCRLRAKAAEEEISLEELSRVLLMINKKRGYKSSRKVKKEEDGVLIDGMEIAKKLYEEDLTPGQLCSQLLESGKKVLPDFYHSDLQEELDRIWSVQKQFHPDVFCDAAKEEIKGKNRSQTWAILANYFVWKEEVVGWNDREAKNETIEKECKLVGLKRTTKGYELKKENYRWRAQALTEQLGLEEIAVVLQEINGQINASSGYLGAISDRSKVLYFNHQTVGQYQMAELDKNPHASLRNMVFYRQDYLDEFDRIWEKQAEFHKELTAELKKEIRDMIIFYQRRLKSQKGLISFCEFERLEIVVEKDGKKQTKVIGCKVIPRSHPLFQEFKVWQTLNDIKVLGREKKRNALSASESRALYPEEKEILARELAIKENMKKADVLKLLFENPQELDLNFKQIDGNRTGFSLFSAYSKMIEKYGYEPLDFKKPADEIIGQLRTIFTDLGWNTNLFTIDLTKEGKELEMQPYFRLWHLLYSFEGDNTSTGNGKLIEKIMQLCGVEKEYAVELASLSFQDDYGSLSAKAIKRILPYLKEGNLYDVACEYAGYRHSKSSLTKEEIENKVLKGKLEVLPKNSLRNPVVEKILSQMVNVINTIIDTYGKPDEIRVELARELKKSAKEREELTKAIAKSTREHEEIRKLLQDEFGMMNVSRNDIIRYKLYEELKDNGYKTLYSNQYIPKEKIFSKEIDIEHIIPQSRLFDDSLSNKTLEYKAINIEKGNKTAYDFVKEKYGEEGLQQYINRCESLFNDKKAKLRKLKMEQKDIPDGFIDRDLRNTQYIAKKALAMLNEICRRVVATTGSITDQLREDWQLVDVMKELNLPKYEALGFVETYEDKDGRKIKRIKDWTKRNDHRHHAMDALTVAFTKDAFIQYFNNKNAAQDSGNRNHTNIIGIKTRYFDKGRALPPIPLEQFRIEAKQHLEKLLVSIKAKNKVVTVNVNRTKKRKGENTKIQQTPRGQLHLETVYGSHKQYVTKIEKVNASFDAAKIATVSKRAYRNALLKRLETFGNDPKKAFTGKNALEKNPLYADKYQTIRVPEKVQTVEFETIYTIRKPVDPALNVDKVVDVKVRAILERRLKEYGGDPKKAFVNFWENPIWLNKEKGISIKRVSIRGINNAQSIHVKKDKNGNPIWDENGKQIPVDFVNTGNNHHVAIYRKPVLDKKGQVTFDEDGNLMYELDEVVVPFFEAVTRANLGLPIIDKDYRKSEGWQFLFSMKQNEYFVFPNEKTGFNPKEVDLLNPDNYAMISPNLFRVQTMSKVMYGNNVVRDYKFRHHLETTVKDMKELKDIAYKQYKTLSFGNSVVKIRINHIGQIVSVGEY

SEQ ID NO: 302 - protein, 1055 aa, Bacteroides sp.
MRIYRKDLAQDVDVTNELLKTEEDYVALFDWLNGKKEIDQKAFLKYPLFGLKKEVENYRWNYVQDKPYPCNETRSSMLARLEKCDISIEFLTKENEEALWHILYSVEDKNEIVKALQKFADKHDLNASFVDVFQKFPPFKKEYGSYSAKAIKKLLPLMRMGKYWSENSIDKGTRERMDKIITGEYDEKIENRVREKAIHLADVSDFKGLPLWLVCYIVYGRHSEAKEITQWKSPADIDLYLRSFKQHSLRNPIVEQIIIETLRVVRDIWKQVGNIDEIHVELGREMKNPADKRKKMTQQMSENENTNLRIKYLLTEFLNPEYEVENVRPYSPSQQDILRIYEEGVLNSVSDLPEEISDILKKFTETDLKKRPSRSEVLRYKLWLEQKYRSPYTGEVIPLGKLFTPAYEIEHVIPQSCYFDDSFSNKVICEAEVNKLKSNLLGHEFIVKHHGEIVELPFGKKVRIFTVDEYEQFVKDNYSRTRSKMKKLLMDDIPEEFVARQLNDSRYISKVVKSLLSNIVREKGEEEAISKNVIPCTGGVTDRLKKDWGINEVWNKIILPRFQRLNELTGTNKFTTKNVGIQEIPTMPLELQKGFNKKRIDHRHHAMDAIIIACANRNIINYLNNESATAKAELSRYDLQKMLCDKAKTDNNGNYKWVIRKPWASFTQDTYLALENIIVSFKQNLRVINKATNHFLHYNEEGKKIFVKQGKGDNWAIRKSMHKDTVFGEVNLRRIKTVALNEAMKNPQSIVVKDFKRKLLELWNLGFDAKRIKKYFEDNRETWSDINLSKIEVYYFSKDTKDRFFATRKPLDTSFDRKKIENNITDTGIQKILLRHLELKDNNPDIAFSPDGIDEMNRNIIQLNNGKYHQPIIKVRWYEQADKFAVGQTGNKSSKFVEAAKGTNLFFAVYESNILDKKTNTIIKKRNYATIPLNVAIERQKQGLPVAPEDENGNDPIFVLSPNDLVYLPTAADLANGIIAQPLDRGRIYKMVSCTGNEGYFIPARIANPILQTIELGSNNKAQKAWTDEMIKEICMPIKVDRLGNVLESSSSYKK

SEQ ID NO: 303 - protein, 1055 aa, Bacteroides sp.
MRIYRKDLAQDVDVTNELLKTEEDYVALFDWLNGKKEIDQKAFLKYPVFGLKKEIENYRWNYVQDKPYPCNETRSLMLARLEKCDISIEFLTKENEEALWHILYSVEDKNEIVKALQKFADKHDLNASFVDVFQKFPPFKKEYGSYSAKAIKKLLPLMRMGKYWSENSIDKGTRERIDKIITGEYDEKIENRVREKAIHLADVSDFKGLPLWLVCYIVYGRHSEAKEIIQWKSPADIDSYLRSFKQHSLRNPIVEQIIIETLRVVRDIWKQVGNIDEIHVELGREMKNPADKRKKMTQQMSENENTNLRIKYLLTEFLNPEYEVENVRPYSPSQQDILRIYEEGVLNSVSDLPEEISDILKKFTETDLKKRPSRSEVLRYKLWLEQKYRSPYTGEVIPLGKLFTPAYEIEHVIPQSCYFDDSFSNKVICEAEVNKLKSNLLGHEFIVKHHGEIVELPFGKKVRIFTVDEYEQFVKDNYSRTRSKMKKLLMDDIPEEFVTRQLNDSRYISKVVKSLLSNIVREKGEEEAISKNVIPCTGGVTDRLKKDWGINEVWNKIILPRFQRLNELTGTNKFTTKNVGIQEIPTMPLELQKGFNKKRIDHRHHAMDAIIIACANRNIINYLNNESATAKAELSRYDLQKMLCDKAKTDNNGNYKWVIRKPWASFTQDTYLALENIIVSFKQNLRVINKATNRFLHYNEEGKKIFVKQGKGDNWAIRKSMHKDTVFGEVNLRRIKTVALNEAMKNPQSIVVKDFKRKLLELWNLGFDAKRIKKYFEDNRETWSDINLSKIEVYYFSKDTKDRFFATRKPLDTSFDRKKIENNITDTGIQKILLRHLELKDNNPDIAFSPDGIDEMNRNIIQLNNGKYHQPIIKIRWYEQADKFAVGQTGNKSSKFVEAAKGTNLFFAVYESNILDKKTNTIIKKRNYATIPLNVAIERQKQGLPVAPEDENGNDPIFVLSPNDLVYLPTDDELANGIIAQPLDRGRIYKMVSSSGEQCFFIKHIVANVLVDKFEFSPLNKMERALTGEMIKMICIPIKVDRLGNVLESSSSYKK

SEQ ID NO: 304 - protein, 286 aa, Bacteroides uniformis
MLSYKYDKKKIEKYFKENAFLWKELDIAKVAVYYFTENTTEPLVAVRKSLDSTFNEKKIASVTDTGIQKILLNHLKSKEGKAELAFSAEGIEEMNRNLLQLNDGKGHQPIYKVRVYEPRGNKFKVGVLGNKGAKWVEAAKGTNLFFAIYITEDGNRTYETIPLNWVIEREKQGLVPVPDRNEKGDKLLFWLSPNDLVYLPTEEERDFGRINEPIDRGRIYKMVSSSGNQCFFIPQSISNAIISTKELGSNNKAEKSWDGEMIKNICIPVKVDRLGRIIEVKYRVNE

SEQ ID NO: 305 - protein, 1508 aa, Bacteroides uniformis
MRTILGLDLGTNSIGWAVINSVIKEQTERIWIEMAGSRIIPMDAAILGDFDKGNSISQTAERTRFRGVRRLRERQLLRRERLHKVLKILGFLPEHYLKGIDFEKHTGKFLSGSEPKLPWVKDRWGKYSFLFQTAFNEMLADFAKHQPSLVFDGKKIPYDWTVYYLRKKALTEMISKEELAWILLNFNQKRGYYQLRGEEEEDNAGKSVEFYALKVLSVEATDEKKGRDIWYNVHLENGWVYRRSSNVPLDWEGRVKEFIVTTDLNPDGTPKLDKYGEVKRSFRAPKEDDWMLIKKRTEADITGTHKTIGSYIYDALLQEPQQKIIGKLVKTVERKFYKEELNFILQKQCAFHAELQDRDLYMRCIEALYPGNEVQRRNIANRDFIYLLIDDVLFYQRPLKTKKSLIANCPYEENEYVNRKTGEIKTAPLKCIAKSHPLFQEFRLWYFLSNIRVYQKEREVNGTLHLDVDVTTEFLKTEDDYVALFDWLNSRKEIDQKAFLRYPAFGLKKEINNYRWNYVEDKFYPCNETRHAILSRLEKAGIGIDFLSDEKETALWHILYSVSDKQEIEKALATFAVKNGLNESFVEVFKKFPPFKSEYGAYSAKAIKKLLPLMRCGKYWDMSLIDGTTKERIERIIAGECDESIGAKVREKAMNLSDISCFKRLPLWLACYVVYNRHSEDKEITKWETPADIDAYLAAFKQHSLRNPIVEQVITETLRVVRDIWKQVGKIDEIRIELGREMKNPADKRKRMTTQILENENANLRIKALLAEFVNPEYGVENVRPYSPSQQEILRIYEDAVLKGEEQIPEDIDVILKKFNTSKLPTKSEFLRYKLWLEQKYRSPYTGELIPLAKLFTAAYEIEHVIPQSRYFDDSFSNKVICESAVNKLKDNQLGYEFIKNHHGQKVEVGFGKTVEIFSVDSYERFVKEQYAKSGIKMKKLLMDDIPEQFIERQLNDSRYISKVVKGLLSNIVREKNDSGEYEPEAVSKNILVCTGSVTDRLKKDWGMNDVWNSIVSPRFERLNALTETQCFGHWENKDGKKVFQTAVPLEYQKGFSKKRIDHRHHAMDAIVIACATRNHVNYLNNESASRNAKISRYDLQRLLCDKSRGDGNGNYRWIIKKPWTTFTQDAREALSGIIVSLKQNLRIINKTTNIYQHFDANGTRVYEKQKIGDSWAIRKPMHKDTVFGAVNLRKVKVVRLSVALDTPSMIVNKRVKNKVLELLSYKYDKKKIEKYFKENAFLWKELDIAKVAVYYFTENTTEPLVAVRKSLDSTFNEKKIASVTDTGIQKILLNHLKSKEGKAELAFSAEGIEEMNRNLLQLNDGKGHQPIYKVRVYEPRGNKFKVGVLGNKGAKWVEAAKGTNLFFAIYITEDGNRTYETIPLNWVIEREKQGLVPVPDRNEKGDKLLFWLSPNDLVYLPTEEERDFGRINEPIDRGRIYKMVSSSGNQCFFIPQSISNAIISTKELGSNNKAEKSWDGEMIKNICIPVKVDRLGRIIEVKYRVNE

SEQ ID NO: 306 - protein, 1210 aa, Bacteroides uniformis
MRTILGLDLGTNSIGWAVINSVIKEQTERIWIEMAGSRIIPMDAAILGDFDKGNSISQTAERTRFRGVRRLRERQLLRRERLHKVLKILGFLPEHYLKGIDFEKHTGKFLSGSEPKLPWVKDRWGKYSFLFQTAFNEMLADFAKHQPSLVFDGKKIPYDWTVYYLRKKALTEMISKEELAWILLNFNQKRGYYQLRGEEEEDNAGKSVEFYALKVLSVEATDEKKGRDIWYNVHLENGWVYRRSSNVPLDWEGRVKEFIVTTDLNPDGTPKLDKYGEVKRSFRAPKEDDWMLIKKRTEADITGTHKTIGSYIYDALLQEPQQKIIGKLVKTVERKFYKEELNFILQKQCAFHAELQDRDLYMRCIEALYPGNEVQRRNIANRDFIYLLIDDVLFYQRPLKTKKSLIANCPYEENEYVNRKTGEIKTAPLKCIAKSHPLFQEFRLWYFLSNIRVYQKEREVNGTLHLDVDVTTEFLKTEDDYVALFDWLNSRKEIDQKAFLRYPAFGLKKEINNYRWNYVEDKFYPCNETRHAILSRLEKAGIGIDFLSDEKETALWHILYSVSDKQEIEKALATFAVKNGLNESFVEVFKKFPPFKSEYGAYSAKAIKKLLPLMRCGKYWDMSLIDGTTKERIERIIAGECDESIGAKVREKAMNLSDISCFKRLPLWLACYVVYNRHSEDKEITKWETPADIDAYLAAFKQHSLRNPIVEQVITETLRVVRDIWKQVGKIDEIRIELGREMKNPADKRKRMTTQILENENANLRIKALLAEFVNPEYGVENVRPYSPSQQEILRIYEDAVLKGEEQIPEDIDVILKKFNTSKLPTKSEFLRYKLWLEQKYRSPYTGELIPLAKLFTAAYEIEHVIPQSRYFDDSFSNKVICESAVNKLKDNQLGYEFIKNHHGQKVEVGFGKTVEIFSVDSYERFVKEQYAKSGIKMKKLLMDDIPEQFIERQLNDSRYISKVVKGLLSNIVREKNDSGEYEPEAVSKNILVCTGSVTDRLKKDWGMNDVWNSIVSPRFERLNALTETQCFGHWENKDGKKVFQTAVPLEYQKGFSKKRIDHRHHAMDAIVIACATRNHVNYLNNESASRNAKISRYDLQRLLCDKSRGDGNGNYRWIIKKPWTTFTQDAREALSGIIVSLKQNLRIINKTTNIYQHFDANGTRVYEKQKIGDSWAIRKPMHKDTVFGAVNLRKALIPQHYNLTLFISS

SEQ ID NO: 307 - protein, 1504 aa, Bacteroides vulgatus
MKNIVGLDLGTNSIGWAVVNGSVNDDGSEQLVKIQASGSRIIPMDAAMIGDFNKGNSISQTAERTRLRGVRRLSERYLLRRERLHRILDILGFLPFHFAQDLDRHGKIVKGKEPKLAWRKNEAGQFEFIFQDSFKEMLEDFKLNHPNLITDDKKVPYDWTIYYLRKKGLTSKISKEELAWILLNFNQKRGYYQLRGEEEEENKNKLVEFYALKVVAVEDSGEKKGKDIWYNVHLENGWVYRRTSNMPLDWVGKTKEFIVTTDLEKDGTPKKDKEGNVKRSFRAPKEDDWSLLKKKTEADIDQTHKTVGVYIYDTLLGNPSQKIRGRLVRTIERKYYKEELKQILEKQKEFHLELQDRALYAACIEELYPINEAHRNNVGNRDFTYLFLEDILFYQRPLKSKKSLIDNCPYEENQGLDKETGEIKSFPVKCIAKSHPLFQEFRLWQFIVNLRIYRKDLAQDVDVTNELLKTEEDYVALFDWLNGKKEIDQKAFLKYPVFGLKKEIENYRWNYVQDKPYPCNETRSLMLARLEKCDISIEFLTKENEEALWHILYSVEDKNEIVKALQKFADKHDLNASFVDVFQKFPPFKKEYGSYSAKAIKKLLPLMRMGKYWSENSIDKGTRERIDKIITGEYDEKIENRVREKAIHLADVSDFKGLPLWLVCYIVYGRHSEAKEITQWKSPADIDSYLRSFKQHSLRNPIVEQIIIETLRVVRDIWKQVGNIDEIHVELGREMKNPADKRKKMTQQMSENENTNLRIKYLLTEFLNPEYEVENVRPYSPSQQDILRIYEEGVLNSVSDLPEEISDILKKFTETDLKKRPSRSEILRYKLWLEQKYRSPYTGEVIPLGKLFTPAYEIEHVIPQSCYFDDSFSNKVICEAEVNKLKSNLLGHEFIVKHHGEIVELPFGKKVRIFTVDEYEQFVKDNYSRTRSKMKKLLMDDIPEEFVTRQLNDSRYISKVVKSLLSNIVREKGEEEAISKNVIPCTGGVTDRLKKDWGINEVWNKIILPRFQRLNELTGTNKFTTKNVGIQEIPTMPLELQKGFNKKRIDHRHHAMDAIIIACANRNIINYLNNESATAKAELSRYDLQKMLCDKAKTDNNGNYKWVIRKPWASFTQDTYLALENIIVSFKQNLRVINKATNRFLHYNEEGKKIFVKQGKGDNWAIRKSMHKDTVFGEVNLRRIKTVALNEAMKNPQSIVVKDFKRKLLELWNLGFDAKRIKKYFEDNRETWSDINLSKIEVYYFSKDTKDRFFATRKPLDTSFDRKKIENNITDTGIQKILLRHLELKDNNPDIAFSPDGIDEMNRNIIQLNNGKYHQPIIKIRWYEQADKFAVGQTGNKFSKFVEAAKGTNLFFAVYESNILDKKTNTIIKKRNYATIPLNVAIERQKQGLPVAPEDENGNDPIFVLSPNDLVYLPTDDELANGIIAQPLDRGRIYKMVSCTGNEGHFIPARIANPILQTIELGSNNKAQKAWTDEMIKEICMPIKVDRLGNVLESSSSYKK

SEQ ID NO: 308 - protein, 1153 aa, Barnesiella intestinihominis
MKNILGLDLGLSSIGWSVIRENSEEQELVAMGSRVVSLTAAELSSFTQGNGVSINSQRTQKRTQRKGYDRYQLRRTLLRNKLDTLGMLPDDSLSYLPKLQLWGLRAKAVTQRIELNELGRVLLHLNQKRGYKSIKSDFSGDKKITDYVKTVKTRYDELKEMRLTIGELFFRRLTENAFFRCKEQVYPRQAYVEEFDCIMNCQRKFYPDILTDETIRCIRDEIIYYQRPLKSCKYLVSRCEFEKRFYLNAAGKKTEAGPKVSPRTSPLFQVCRLWESINNIVVKDRRNEIVFISAEQRAALFDFLNTHEKLKGSDLLKLLGLSKTYGYRLGEQFKTGIQGNKTRVEIERALGNYPDKKRLLQFNLQEESSSMVNTETGEIIPMISLSFEQEPLYRLWHVLYSIDDREQLQSVLRQKFGIDDDEVLERLSAIDLVKAGFGNKSSKAIRRILPFLQLGMNYAEACEAAGYNHSNNYTKAENEARALLDRLPAIKKNELRQPVVEKILNQMVNVVNALMEKYGRFDEIRVELARELKQSKEERSNTYKSINKNQRENEQIAKRIVEYGVPTRSRIQKYKMWEESKHCCIYCGQPVDVGDFLRGFDVEVEHIIPKSLYFDDSFANKVCSCRSCNKEKNNRTAYDYMKSKGEKALSDYVERVNTMYTNNQISKTKWQNLLTPVDKISIDFIDRQLRESQYIARKAKEILTSICYNVTATSGSVTSFLRHVWGWDTVLHDLNFDRYKKVGLTEVIEVNHRGSVIRREQIKDWSKRFDHRHHAIDALTIACTKQAYIQRLNNLRAEEGPDFNKMSLERYIQSQPHFSVAQVREAVDRILVSFRAGKRAVTPGKRYIRKNRKRISVQSVLIPRGALSEESVYGVIHVWEKDEQGHVIQKQRAVMKYPITSINREMLDKEKVVDKRIHRILSGRLAQYNDNPKEAFAKPVYIDKECRIPIRTVRCFAKPAINTLVPLKKDDKGNPVAWVNPGNNHHVAIYRDEDGKYKERTVTFWEAVDRCRVGIPAIVTQPDTIWDNILQRNDISENVLESLPDVKWQFVLSLQQNEMFILGMNEEDYRYAMDQQDYALLNKYLYRVQKLSKSDYSFRYHTETSVEDKYDGKPNLKLSMQMGKLKRVSIKSLLGLNPHKVHISVLGEIKEIS

SEQ ID NO: 309 - protein, 1352 aa, Belliella baltica
MKKILGLDLGTTSIGWAFIKEPEKDVVGSEIVDMGVRIVPLSSDEENDFAKGNTISINADRTLKRGARRNLQRFKQRRNALLEIFKEKKLISTNFKYAEDGPSSTFSTLNLRAKAAKEKIELQDLVKVLLQINKKRGYKSSRKAKSEEDDGSAIDSMGIAKELYENDLTPGQWVYEALQKGRKNVPDFYRSDLQEEFKKIVNYQSEFFPDIFNASFVEDWMGKASTPTKQYFNKKGVQLAENKGKREERRLQEYKWRAEAVNFKIDLSEIALILSQINSQISNSSGYLGAISDRSKELYFKNLTVGQYLYQQIKKNPHTRLKGQVFYRQDYLDEFERIWSVQSSFYPQLNDALKREVRDITIFFQRRLKSQKHLISNCEFEDHHKVVPKSHPVFQEFRIWQNLNNLLLIKKDNLNEKFDLELESKIALANELAFKRELNVKDALKILGLKPNEWEFNFTKIEGNRTNQAFFDAFAKIIELEDGEPIDLGDLKADDILDQFSEAFLRIGIDTELLQVNSDIEGAEYEKQSYIQFWHLLYSSEDDQKLKLNLIRKFGFKPEHAKILASISLQDDHASLSSRAIKKILPHLQSGLIYDKACTYAGYNHSSSFTKDENEKRELRAELELLKKNSLRNPVVEKILNQMINVVNAILKDPELGRPDEIRVEMARELKANAEQRKNMTSNIASATRDHDKYREILKSEFGLKRVTKNDLLRYKLWLETDGISLYTGKPIEASKLFSKEYDIEHIIPKARLFDDSFSNKTICERQLNIDKANVTAFSFLQNKLSADEFEQYQSRVKSLYGKLSKAKIQKLLMANDKIPEDFIARQLQETRYISKKAKEILFEISRRVSVTTGTITDKLREDWGLVEIMKELNWEKYDKLGLTYTIEGKHGERLNKIKDWSKRNDHRHHAMDALTVALTKPAYIQYLNNLNAKGLNNKKGTEVFAIEQKYLKRENGKLCFIPPIENIRSEAKKHLSRILVSYKAKNKVVTINKNKTKSKAGLNEQIALTPRGQLHKETVYGKSFHYSTKFEKIGASFNVQKINTVAKKEEREALLKRLAENGNDPKKAFTGKNTLNKMPIYLDLGKNIKLSEKVKTVVLEQNYTIRKNIDPDLKVDKVIDVGIKRILESRLEEFGGNAKLAFSNLEENPIWLNKEKGISIKRVKISGVSNVESLHVKKDHFGEPILDQEGNEIPVDFVSTGNNHHVAIYEDENGNLQEEVVSFFEAVVRQNQGLPIIKKNHTLGWKFLFTLKQNEYFVFPSDDFVPADVDLMDEQNYHLISPNLFRVQKIARKNYVFNNHLETKAVDNDLLKSKKELSKITYHFYQTPEHLRGIIKIRINHLGKIIQIGEY

SEQ ID NO: 310 - protein, 1415 aa, Bergeyella zoohelcum
MKHILGLDLGTNSIGWALIERNIEEKYGKIIGMGSRIVPMGAELSKFEQGQAQTKNADRRTNRGARRLNKRYKQRRNKLIYILQKLDMLPSQIKLKEDFSDPNKIDKITILPISKKQEQLTAFDLVSLRVKALTEKVGLEDLGKIIYKYNQLRGYAGGSLEPEKEDIFDEEQSKDKKNKSFIAFSKIVFLGEPQEEIFKNKKLNRRAIIVETEEGNFEGSTFLENIKVGDSLELLINISASKSGDTITIKLPNKTNWRKKMENIENQLKEKSKEMGREFYISEFLLELLKENRWAKIRNNTILRARYESEFEAIWNEQVKHYPFLENLDKKTLIEIVSFIFPGEKESQKKYRELGLEKGLKYIIKNQVVFYQRELKDQSHLISDCRYEPNEKAIAKSHPVFQEYKVWEQINKLIVNTKIEAGTNRKGEKKYKYIDRPIPTALKEWIFEELQNKKEITFSAIFKKLKAEFDLREGIDFLNGMSPKDKLKGNETKLQLQKSLGELWDVLGLDSINRQIELWNILYNEKGNEYDLTSDRTSKVLEFINKYGNNIVDDNAEETAIRISKIKFARAYSSLSLKAVERILPLVRAGKYFNNDFSQQLQSKILKLLNENVEDPFAKAAQTYLDNNQSVLSEGGVGNSIATILVYDKHTAKEYSHDELYKSYKEINLLKQGDLRNPLVEQIINEALVLIRDIWKNYGIKPNEIRVELARDLKNSAKERATIHKRNKDNQTINNKIKETLVKNKKELSLANIEKVKLWEAQRHLSPYTGQPIPLSDLFDKEKYDVDHIIPISRYFDDSFTNKVISEKSVNQEKANRTAMEYFEVGSLKYSIFTKEQFIAHVNEYFSGVKRKNLLATSIPEDPVQRQIKDTQYIAIRVKEELNKIVGNENVKTTTGSITDYLRNHWGLTDKFKLLLKERYEALLESEKFLEAEYDNYKKDFDSRKKEYEEKEVLFEEQELTREEFIKEYKENYIRYKKNKLIIKGWSKRIDHRHHAIDALIVACTEPAHIKRLNDLNKVLQDWLVEHKSEFMPNFEGSNSELLEEILSLPENERTEIFTQIEKFRAIEMPWKGFPEQVEQKLKEIIISHKPKDKLLLQYNKAGDRQIKLRGQLHEGTLYGISQGKEAYRIPLTKFGGSKFATEKNIQKIVSPFLSGFIANHLKEYNNKKEEAFSAEGIMDLNNKLAQYRNEKGELKPHTPISTVKIYYKDPSKNKKKKDEEDLSLQKLDREKAFNEKLYVKTGDNYLFAVLEGEIKTKKTSQIKRLYDIISFFDATNFLKEEFRNAPDKKTFDKDLLFRQYFEERNKAKLLFTLKQGDFVYLPNENEEVILDKESPLYNQYWGDLKERGKNIYVVQKFSKKQIYFIKHTIADIIKKDVEFGSQNCYETVEGRSIKENCFKLEIDRLGNIVKVIKR

SEQ ID NO: 311 - protein, 1430 aa, Bergeyella zoohelcum
MKHILGLDLGTNSIGWAVVKEAQNDNEQSEIVDVGVRVNPLTTDEKTNFEKGKPISTNADRTLKRSARRNLQRYKLRRKELIELLKEHQLISTDTILTENGKGTTFQTLELRAKSAKEKISLEELARVFLTINKKRGYKSSRKAKNEDEGQLIDGMEIAKRLYEENLTTGQLSLQLLKEGKKSLPDYYRSDLQFELDKVWNFQKQFHSDILTDEFYAQLKGKGQRATSALFLAKYQIYTAENKGSREDKKLQAYQWRVDALSKELTREQLAFVITEINNNLNNSSGYLGAISDRSKELYFNNETVGEYLWKQIAANPHTSLKNQVFYRQDYLDEFEQIWKTQSAFYPEILTDELKKELRDVVIFYQRKLKSQKSLVSFCEFENKEIEIKKEDGTSTKKVIGLKVAPKSSPLFQEFKIWQNLNNVLIRKKGSKTKKVAKNQQAVLFEEEKTISELDLEAKQALFNELNLKGNLKADYCLEILGYSPKEWEMNYSVLEGNRTNKALYEAYLKITDLEGYDAKNHLKVKLNKDEVELDDLKVPASEIKDMVQAIFKEAGINTDILHFNAELDGKDFENQASYQLWHLLYSYEGDDSKSGNELLYKLLETKFGFKKEYAQILANVSLSDDYGSLSTKAMRKIHPYIKENKFSTACELAGYRHSKHSLTKEENDNRVLKDSLEVLKKNSLRQPVVEKILNQMINLVNALLKKYRTENPNFKFDEIRIELARELKKNAEERANMTANINKAKTEHEKIIKILKNEFGLPNPTRNDIIRYRLYEELKANGYKDLYTNIKIPQEKLFTKEIDIEHIIPKSRVFDDSFSNKTLSFRKTNLDKGERTAFDYMESKFGADKLEEYVARVEDLYKNNIISKAKYQKLLKKESEIGDGFVERDLRETQYIAKKAKEILLQITPNVLSTSGGITDRLREDWDLINVMKELNLPKYRALGLTQMEDRKYGQQVEVITDWTKRNDHRHHAMDALTVAFTKHNHIQYLNYLNARKNEKHKEHSNIMGIQQLETIKVTDKNGNEKRVFKAPMPNFRQVTKAFLENILISHKAKNKVVTKNKNKVAGSNKVQEVLTPRGQLHKETVYGKYQYYVQKEEKIGAKFDLETIKKVANPLYQSLLKKRLEENGGDPKKAFTGKNSLAKNPIYLDDTQTEQLPEKVKLVWLENSFSIRKDITPENFKDEKLIDKILDEGVKRILKERLQSFGNDAKKAFSDLDKNPIWLNKEKGITIKRVTISGVANAEPLHTKKDHLGKEILDKEGKPIPVDFISTGSNHHVAVYRDEKGNLQEKVVSVFEAVVRANQGLPIIDKTYNQHLGWEFLFTMKQNEMFVFPNESTGFNPNDIDLLDPKNKRIISPNLFRVQKFSKLQYGNSFVREFVFRHHLETTVEDRKELQGITYKQMKNSTFFNDIIKVRINHLGDIVSIGEY

SEQ ID NO: 312 - protein, 1281 aa, Bifidobacterium bifidum
MEDDSQHDIREIYLAIHHMVKYRGNFLVEGTLESSNAFKEDELLKLLGRITRYEMSEGEQNSDIEQDDENKLVAPANGQLADALCATRGSRSMRVDNALEALSAVNDLSREQRAIVKAIFAGLEGNKLDLAKIFVSKEFSSENKKILGIYFNKSDYEEKCVQIVDSGLLDDEEREFLDRMQGQYNAIALKQLLGRSTSVSDSKCASYDAHRANWNLIKLQLRTKENEKDINENYGILVGWKIDSGQRKSVRGESAYENMRKKANVFFKKMIETSDLSETDKNRLIHDIEEDKLFPIQRDSDNGVIPHQLHQNELKQIIKKQGKYYPFLLDAFEKDGKQINKIEGLLAFRVPYFVGPLVVPEDLQKSDNSENHWMVRKKKGEITPWNFDEMVDKDASGRKFIERLVGTDSYLLGEPTLPKNSLLYQEYEVLNELNNVRLSVRTGNHWNDKRRMRLGREEKTLLCQRLFMKGQTVTKRTAENLLRKEYGRTYELSGLSDESKFTSSLSTYGKMCRIFGEKYVNEHRDLMEKIVELQTVFEDKETLLHQLRQLEGISEADCALLVNTHYTGWGRLSRKLLTTKAGECKISDDFAPRKHSIIEIMRAEDRNLMEIITDKQLGFSDWIEQENLGAENGSSLMEVVDDLRVSPKVKRGIIQSIRLIDDISKAVGKRPSRIFLELADDIQPSGRTISRKSRLQDLYRNANLGKEFKGIADELNACSDKDLQDDRLFLYYTQLGKDMYTGEELDLDRLSSAYDIDHIIPQAVTQNDSIDNRVLVARAENARKTDSFTYMPQIADRMRNFWQILLDNGLISRVKFERLTRQNEFSEREKERFVQRSLVETRQIMKNVATLMRQRYGNSAAVIGLNAELTKEMHRYLGFSHKNRDINDYHHAQDALCVGIAGQFAANRGFFADGEVSDGAQNSYNQYLRDYLRGYREKLSAEDRKQGRAFGFIVGSMRSQDEQKRVNPRTGEVVWSEEDKDYLRKVMNYRKMLVTQKVGDDFGALYDETRYAATDPKGIKGIPFDGAKQDTSLYGGFSSAKPAYAVLIESKGKTRLVNVTMQEYSLLGDRPSDDELRKVLAKKKSEYAKANILLRHVPKMQLIRYGGGLMVIKSAGELNNAQQLWLPYEEYCYFDDLSQGKGSLEKDDLKKLLDSILGSVQCLYPWHRFTEEELADLHVAFDKLPEDEKKNVITGIVSALHADAKTANLSIVGMTGSWRRMNNKSGYTFSDEDEFIFQSPSGLFEKRVTVGELKRKAKKEVNSKYRTNEKRLPTLSGASQP

SEQ ID NO: 313 - protein, 1121 aa, Bifidobacterium dentium
MSVGLAAIEVDETGFPIRILNIQSVIHDGGIDPQLGKKKSISRKAISGVARRTRRMRRRKVVRLRQLDATLESLGFPIVEPDSLDTWEIWLTRAKLASSYIQDDETRKEDVSIALRHIARHRGWRNPYSNVESLFVDVAPSEQYEELRRKAEEKLGTSLSGNPTSAEIVECILKRQVGEVQLRTRSRKGVNGNAVEKEGLLPTKLMQSDNAAEIRRIFKVQRIDDETGRKLLRAVFKACSPKGSVERRVGRDALAPGLPRALKASLAFQEYRIANVLTNLVISEDGTKRKLTIAEKQRVFGFLSSNETDDITWIDVAEKLGLERRQIQGVGCLTADGEERISSTPPRNITALHIHSAKPVIREKLVAWWKAASPTVRETMVELLSNTVDIDRVREDMDYSSAVAFIDSLGDEELTALDSVDLLSGRAAYSRQTLKQLTERMLNTDDDLHEARKAVFGVDDNWKPPVDAISTSVGNPAVDRVLKIVNRYLLACQKRWRNPQSVQIEHVRESFSSVAKAKETERVQGERARYRNDLRRELCEQEGLNKIRESDIRRWESVQRQNGTCLYCGSPITFRTCEMDHIVPRKGVGSTNTRVNLAAACAACNKLKSNTAFSVWARTEGAANRKVSQRDAIERVKTFIFNKSVPPREQRAFKQAVISRLRQAESDPAIDNRSIESVAWMADELHRRIEAYFNQDADVSGNTPATQVWVFQGRVTALARKASGIEGRIHFAGEWKKTRLDRRHHAVDAAVIAMMNHSAAQTLVERDSLRLSQWITRKPETWKNYPFSEGQKKTRFKEWLDCMNALLDLLNDALDSDRVPVTRCQRMSLGNSQAHAATIRKMKRVELFSPMDADLIRRASTPALYCALTRLPEYSPEKGLPENRGREIVLNGRHIRSTETVDFFASGAAQLMVRNGSAEIGDSIHHMRIYRYRKTGAKSQEYVYGMIRVFQIDLLHASSENLFAVQLPSQSVSVRYGDKNVVQAIQEGRAEYLGHIVPNDEILISYEGVRMKDSEKIGAYANDFSGTASELAQRRHWVVVGSDVSKLALRPSYLSEEGLENSGSESERLSKQTRKVIEGKGWVVAVNILAKYHPVVIRRNALGEPRFRTNSGMPVSWRWDR

SEQ ID NO: 314 - protein, 354 aa, Bifidobacterium longum
AKQYVNSASIDDAEAETMKTTVSVFQGRVTASARRAAGIEGKIHFIGQQSKTRLDRRHHAVDASVIAMMNTAAAQTLMERESLRESQRLIGLMPGERSWKEYPYEGTSRYESFHLWLDNMDVLLELLNDALDNDRIAVMQSQRYVLGNSIAHDATIHPLEKVPLGSAMSADLIRRASTPALWCALTRLPDYDEKEGLPEDSHREIRVHDTRYSADDEMGFFASQAAQIAVQEGSADIGSAIHHARVYRCWKTNAKGVRKYFYGMIRVFQTDLLRACHDDLFTVPLPPQSISMRYGEPRVVQALQSGNAQYLGSLVVGDEIEMDFSSLDVDGQIGEYLQFFSQFSGGNLAWKHWV

SEQ ID NO: 315 - protein, 1124 aa, Bifidobacterium longum
LTGHSGHTFWPTSSSPPIQLEQEKRPLPQRNTSQNGHTFWPITRERCFMRGKRYRIGIDVGLNSVGLAAVEVSDENSPVRLLNAQSVIHDGGVDPQKNKEAITRKNMSGVARRTRRMRRRKRERLHKLDMLLGKFGYPVIEPESLDKPFEEWHVRAELATRYIEDDELRRESISIALRHMARHRGWRNPYRQVDSLISDNPYSKQYGELKEKAKAYNDDATAAEEESTPAQLVVAMLDAGYAEAPRLRWRTGSKKPDAEGYLPVRLMQEDNANELKQIFRVQRVPADEWKPLFRSVFYAVSPKGSAEQRVGQDPLAPEQARALKASLAFQEYRIANVITNLRIKDASAELRKLTVDEKQSIYDQLVSPSSEDITWSDLCDFLGFKRSQLKGVGSLTEDGEERISSRPPRLTSVQRIYESDNKIRKPLVAWWKSASDNEHEAMIRLLSNTVDIDKVREDVAYASAIEFIDGLDDDALTKLDSVDLPSGRAAYSVETLQKLTRQMLTTDDDLHEARKTLFNVTDSWRPPADPIGEPLGNPSVDRVLKNVNRYLMNCQQRWGNPVSVNIEHVRSSFSSVAFARKDKREYEKNNEKRSIFRSSLSEQLRADEQMEKVRESDLRRLEAIQRQNGQCLYCGRTITFRTCEMDHIVPRKGVGSTNTRTNFAAVCAECNRMKSNTPFAIWARSEDAQTRGVSLAEAKKRVTMFTFNPKSYAPREVKAFKQAVIARLQQTEDDAAIDNRSIESVAWMADELHRRIDWYFNAKQYVNSASIDDAEAETMKTTVSVFQGRVTASARRAAGIEGKIHFIGQQSKTRLDRRHHAVDASVIAMMNTAAAQTLMERESLRESQRLIGLMPGERSWKEYPYEGTSRYESFHLWLDNMDVLLELLNDALDNDRIAVMQSQRYVLGNSIAHDATIHPLEKVPLGSAMSADLIRRASTPALWCALTRLPDYDEKEGLPEDSHREIRVHDTRYSADDEMGFFASQAAQIAVQEGSADIGSAIHHARVYRCWKTNAKGVRKYFYGMIRVFQTDLLRACHDDLFTVPLPPQSISMRYGEPRVVQALQSGNAQYLGSLVVGDEIEMDFPVSMLMVRLASIYNSSRSLVEGTLHGNIGLLMDSLTRRS

SEQ ID NO: 316 - protein, 166 aa, Bifidobacterium longum
MGLAAVEVSDENSPVRLLNAQSVIHDGGVDPQKNKEAITRKNMSGVARRTRRMRRRKRERLHKLDMLLGKFGYPVIEPESLDKPFEEWHVRAELATRYIEDDELRRESISIALRHMARHRGWRNPYRQVDSLISDNPYSKQYGELKEKAKAYNDDATAAEEESTPA

SEQ ID NO: 317 - protein, 1138 aa, Bifidobacterium longum
MNSVGLAAVEVSDENSPVRLLNAQSVIHDGGVDPQKNKEAITRKNMSGVARRTRRMRRRKRERLHKLDMLLGKFGYPVIEPESLDKPFEEWHVRAELATRYIEDDELRRESISIALRHMARHRGWRNPYRQVDSLISDNPYSKQYGELKEKAKAYNDDATAAEEESTPAQLVVAMLDAGYAEAPRLRWRTGSKKPDAEGYLPVRLMQEDNANELKQIFRVQRVPADEWKPLFRSVFYAVSPKGSAEQRVGQDPLAPEQARALKASLAFQEYRIANVITNLRIKDASAELRKLTVDEKQSIYDQLVSPSSEDITWSDLCDFLGFKRSQLKGVGSLTEDGEERISSRPPRLTSVQRIYESDNKIRKPLVAWWKSASDNEHEAMIRLLSNTVDIDKVREDVAYASAIEFIDGLDDDALTKLDSVDLPSGRAAYSVETLQKLTRQMLTTDDDLHEARKTLFNVTDSWRPPADPIGEPLGNPSVDRVLKNVNRYLMNCQQRWGNPVSVNIEHVRSSFSSVAFARKDKREYEKNNEKRSIFRSSLSEQLRADEQMEKVRESDLRRLEAIQRQNGQCLYCGRTITFRTCEMDHIVPRKGVGSTNTRTNFAAVCAECNRMKSNTPFAIWARSEDAQTRGVSLAEAKKRVTMFTFNPKSYAPREVKAFKQAVIARLQQTEDDAAIDNRSIESVAWMADELHRRIDWYFNAKQYVNSASIDDAEAETMKTTVSVFQGRVTASARRAAGIEGKIHFIGQQSKTRLDRRHHAVDASVIAMMNTAAAQTLMERESLRESQRLIGLMPGERSWKEYPYEGTSRYESFHLWLDNMDVLLELLNDALDNDRIAVMQSQRYVLGNSIAHDATIHPLEKVPLGSAMSADLIRRASTPALWCALTRLPDYDEKEGLPEDSHREIRVHDTRYSADDEMGFFASQAAQIAVQEGSADIGSAIHHARVYRCWKTNAKGVRKYFYGMIRVFQTDLLRACHDDLFTVPLPPQSISMRYGEPRVVQALQSGNAQYLGSLVVGDEIEMDFSSLDVDGQIGEYLQFFSQFSGGNLAWKHWVVDGFFNQTQLRIRPRYLAAEGLAKAFSDDVVPDGVQKIVTKQGWLPPVNTASKTAVRIVRRNAFGEPRLSSAHHMPCSWQWRHE

SEQ ID NO: 318 - protein, 182 aa, Bifidobacterium longum
MRGKRYRIGIDVGLNSVGLAAVEVSDENSPVRLLNAQSVIHDGGVDPQKNKEAITRKNMSGVARRTRRMRRRKRERLHKLDMLLGKFGYPVIEPESLDKPFEEWHVRAELATRYIEDDELRRESISIALRHMARHRGWRNPYRQVDSLISDNPYSKQYGELKEKAKAYNDDATAAEEESTPA

SEQ ID NO: 319 - protein, 441 aa, Bifidobacterium longum
MVAMLDAGYAEAPRLRWRTGSKKPDAEGYLPVRLMQEDNANELKQIFRVQRVPADEWKPLFRSVFYAVSPKGSAEQRVGQDPLAPEQARALKASLAFQEYRIANVITNLRIKDASAELRKLTVDEKQSIYDQLVSPSSEDITWSDLCDFLGFKRSQLKGVGSLTEDGEERISSRPPRLTSVQRIYESDNKIRKPLVAWWKSASDNEHEAMIRLLSNTVDIDKVREDVAYASAIEFIDGLDDDALTKLDSVDLPSGRAAYSVETLQKLTRQMLTTDDDLHEARKTLFNVTDSWRPPADPIGEPLGNPSVDRVLKNVNRYLMNCQQRWGNPVSVNIEHVRSSFSSVAFARKDKREYEKNNEKRSIFRSSLSEQLRADEQMEKVRESDLRRLEAIQRQNGQCLYCGRTITFRTCEMDHIVPRKGVGSTNTRTNFAAVCAECNRM

SEQ ID NO: 320 - protein, 967 aa, Bifidobacterium longum
MVAMLDAGYAEAPRLRWRTGSKKPDAEGYLPVRLMQEDNANELKQIFRVQRVPADEWKPLFRSVFYAVSPKGSAEQRVGQDPLAPEQARALKASLAFQEYRIANVITNLRIKDASAELRKLTVDEKQSIYDQLVSPSSEDITWSDLCDFLGFKRSQLKGVGSLTEDGEERISSRPPRLTSVQRIYESDNKIRKPLVAWWKSASDNEHEAMIRLLSNTVDIDKVREDVAYASAIEFIDGLDDDALTKLDSVDLPSGRAAYSVETLQKLTRQMLTTDDDLHEARKTLFNVTDSWRPPADPIGEPLGNPSVDRVLKNVNRYLMNCQQRWGNPVSVNIEHVRSSFSSVAFARKDKREYEKNNEKRSIFRSSLSEQLRADEQMEKVRESDLRRLEAIQRQNGQCLYCGRTITFRTCEMDHIVPRKGVGSTNTRTNFAAVCAECNRMKSNTPFAIWARSEDAQTRGVSLAEAKKRVTMFTFNPKSYAPREVKAFKQAVIARLQQTEDDAAIDNRSIESVAWMADELHRRIDWYFNAKQYVNSASIDDAEAETMKTTVSVFQGRVTASARRAAGIEGKIHFIGQQSKTRLDRRHHAVDASVIAMMNTAAAQTLMERESLRESQRLIGLMPGERSWKEYPYEGTSRYESFHLWLDNMDVLLELLNDALDNDRIAVMQSQRYVLGNSIAHDATIHPLEKVPLGSAMSADLIRRASTPALWCALTRLPDYDEKEGLPEDSHREIRVHDTRYSADDEMGFFASQAAQIAVQEGSADIGSAIHHARVYRCWKTNAKGVRKYFYGMIRVFQTDLLRACHDDLFTVPLPPQSISMRYGEPRVVQALQSGNAQYLGSLVVGDEIEMDFSSLDVDGQIGEYLQFFSQFSGGNLAWKHWVVDGFFNQTQLRIRPRYLAAEGLAKAFSDDVVPDGVQKIVTKQGWLPPVNTASKTAVRIVRRNAFGEPRLSSAHHMPCSWQWRHE

SEQ ID NO: 321 - protein, 1151 aa, Bifidobacterium sp.
MRGKRYRIGIDVGLNSVGLAAVEVSDENSPVRLLNAQSVIHDGGVDPQKNKEAITRKNMSGVARRTRRMRRRKRERLHKLDMLLGKFGYPVIEPESLDKPFEEWHVRAELATRYIEDDELRRESISIALRHMARHRGWRNPYRQVDSLISDNPYSKQYGELKEKAKAYNDDATAAEEESTPAQLVVAMLDAGYAEAPRLRWRTGSKKPDAEGYLPVRLMQEDNANELKQIFRVQRVPADEWKPLFRSVFYAVSPKGSAEQRVGQDPLAPEQARALKASLAFQEYRIANVITNLRIKDASAELRKLTVDEKQSIYDQLVSPSSEDITWSDLCDFLGFKRSQLKGVGSLTEDGEERISSRPPRLTSVQRIYESDNKIRKPLVAWWKSASDNEHEAMIRLLSNTVDIDKVREDVAYASAIEFIDGLDDDALTKLDSVDLPSGRAAYSVETLQKLTRQMLTTDDDLHEARKTLFNVTDSWRPPADPIGEPLGNPSVDRVLKNVNRYLMNCQQRWGNPVSVNIEHVRSSFSSVAFARKDKREYEKNNEKRSIFRSSLSEQLRADEQMEKVRESDLRRLEAIQRQNGQCLYCGRTITFRTCEMDHIVPRKGVGSTNTRTNFAAVCAECNRMKSNTPFAIWARSEDAQTRGVSLAEAKKRVTMFTFNPKSYAPREVKAFKQAVIARLQQTEDDAAIDNRSIESVAWMADELHRRIDWYFNAKQYVNSASIDDAEAETMKTTVSVFQGRVTASARRAAGIEGKIHFIGQQSKTRLDRRHHAVDASVIAMMNTAAAQTLMERESLRESQRLIGLMPGERSWKEYPYEGTSRYESFHLWLDNMDVLLELLNDALDNDRIAVMQSQRYVLGNSIAHDATIHPLEKVPLGSAMSADLIRRASTPALWCALTRLPDYDEKEGLPEDSHREIRVHDTRYSADDEMGFFASQAAQIAVQEGSADIGSAIHHARVYRCWKTNAKGVRKYFYGMIRVFQTDLLRACHDDLFTVPLPPQSISMRYGEPRVVQALQSGNAQYLGSLVVGDEIEMDFSSLDVDGQIGEYLQFFSQFSGGNLAWKHWVVDGFFNQTQLRIRPRYLAAEGLAKAFSDDVVPDGVQKIVTKQGWLPPVNTASKTAVRIVRRNAFGEPRLSSAHHMPCSWQWRHE

SEQ ID NO: 322 - protein, 1092 aa, Brevibacillus laterosporus
MAYTMGIDVGIASCGWAIVDLERQRIIDIGVRTFEKAENPKNGEALAVPRREARSSRRRLRRKKHRIERLKYMFVRNGLAVDIQHLEQTLRSQNEIDVWQLRVDGLDRMLTQKEWLRVLIHLAQRRGFQSNRKTDGSSEDGQVLVNVTENDRLMEEKDYRTVAEMMVKDEKFSDHKRNKNGNYHGVVSRASLLVEIHTLFESQRQHHNFLASKDFELEYINIWSSQRPVATKDQIEKMIGTCTFLPKEKRAPKASWHFQYFMLLQTINHIRITNAQGTRPLNKEEIEQVVNMALTKSKVSYHDIRKVLDLSEEYQFVGLDYGKEDEKKKVESKETIIKLDDYHKLNKIFNEVELAKGETWEAVDYDTVAYALTFFKDDEDIRDYLQNKYKDSKNRLVKNVANKEYTNELIEKVSTLSFRKVGHLSLKALRKIIPFLEQGMTYDKACQAAGFNFQGISKKKRSVVLPVIDQISNPVVNRALTQTRKVINALIKKYGSPETIHIETARELSKRFDERKNITKDYKENRDKNERAKKHLSELGIINPTGLDIVKYKLWCEQQGRCMYSNQPISFERLRESGYTEVDHIIPYSRSMNDSYNNRVLVMTRENREKSNQTPYEYMGNDTQRWDEFEQRVTTNPQIKKEKRQNLLLKGFTNRRELEMLERNLNDTRHITKYLSHFISTNLEFSPSDKKKKVVNTSGRITSHLRSRWGLEKNREQNDLHHAMDAVVIAVTSDSFIQQVTNYYKRKERRELNGDDKFPLPWKFFREEVIARLSPNPKEQIEALPNHFYSEDELADLQPIFVSRMPKRSITGEAHQAQFRRVVGKTKEGKNITAKKTALVDISYDKNGDFNMYGRETDPATYEAIKERYLEFGGNAKKAFSTDLHKPKKDGTKGPLIKSVRIMENKTLVHPVNKGKGVVYNSSIVRTDVFQRKEKYYLLPVYVTDVTKGKLPNKVIAAKKGYDDWIEVDDSFTFLYSLYPNDLIFIRQNPKKKISLKKRIESHSISDSKEVQEILTYYKGVDSSTAAIEFITHDGSYYAKGVGVQNLDCFEKYQVDILGNYSKVKGEKRLELETSDNNHKGKDVNSIKSTSR

SEQ ID NO: 323 - protein, 103 aa, Butyrivibrio fibrisolvens
MISVGQSRKDLEDLGYEFKLSFYKEDIIEYEKNGDILVERFLSRTMPQVRNYIETKPIDRPKYDKRNPVGLSKTSSIRKITMDILGNRFYVDKMSFNNVVGTQ

SEQ ID NO: 324 - protein, 177 aa, Butyrivibrio fibrisolvens
MLIAFSQMGYDAYHELTNKYIDFETGEIIDKEGFNELLNNDLVYKNTMYESKWLKIKGNIEKAAEKNKYWYQVNKKCNRGLCNQTVYGTRESDGDVYKISKIDIRTDDGFKKFKNIVDKGNESVFLMYENDPKTFELIMDIYKNYSDSKNPFVQYEKETGDIIRKYSKKITGQRFLN

SEQ ID NO: 325 - protein, 1442 aa, Caenispirillum salinarum
MPVLSPLSPNAAQGRRRWSLALDIGEGSIGWAVAEVDAEGRVLQLTGTGVTLFPSAWSNENGTYVAHGAADRAVRGQQQRHDSRRRRLAGLARLCAPVLERSPEDLKDLTRTPPKADPRAIFFLRADAARRPLDGPELFRVLHHMAAHRGIRLAELQEVDPPPESDADDAAPAATEDEDGTRRAAADERAFRRLMAEHMHRHGTQPTCGEIMAGRLRETPAGAQPVTRARDGLRVGGGVAVPTRALIEQEFDAIRAIQAPRHPDLPWDSLRRLVLDQAPIAVPPATPCLFLEELRRRGETFQGRTITREAIDRGLTVDPLIQALRIRETVGNLRLHERITEPDGRQRYVPRAMPELGLSHGELTAPERDTLVRALMHDPDGLAAKDGRIPYTRLRKLIGYDNSPVCFAQERDTSGGGITVNPTDPLMARWIDGWVDLPLKARSLYVRDVVARGADSAALARLLAEGAHGVPPVAAAAVPAATAAILESDIMQPGRYSVCPWAAEAILDAWANAPTEGFYDVTRGLFGFAPGEIVLEDLRRARGALLAHLPRTMAAARTPNRAAQQRGPLPAYESVIPSQLITSLRRAHKGRAADWSAADPEERNPFLRTWTGNAATDHILNQVRKTANEVITKYGNRRGWDPLPSRITVELAREAKHGVIRRNEIAKENRENEGRRKKESAALDTFCQDNTVSWQAGGLPKERAALRLRLAQRQEFFCPYCAERPKLRATDLFSPAETEIDHVIERRMGGDGPDNLVLAHKDCNNAKGKKTPHEHAGDLLDSPALAALWQGWRKENADRLKGKGHKARTPREDKDFMDRVGWRFEEDARAKAEENQERRGRRMLHDTARATRLARLYLAAAVMPEDPAEIGAPPVETPPSPEDPTGYTAIYRTISRVQPVNGSVTHMLRQRLLQRDKNRDYQTHHAEDACLLLLAGPAVVQAFNTEAAQHGADAPDDRPVDLMPTSDAYHQQRRARALGRVPLATVDAALADIVMPESDRQDPETGRVHWRLTRAGRGLKRRIDDLTRNCVILSRPRRPSETGTPGALHNATHYGRREITVDGRTDTVVTQRMNARDLVALLDNAKIVPAARLDAAAPGDTILKEICTEIADRHDRVVDPEGTHARRWISARLAALVPAHAEAVARDIAELADLDALADADRTPEQEARRSALRQSPYLGRAISAKKADGRARAREQEILTRALLDPHWGPRGLRHLIMREARAPSLVRIRANKTDAFGRPVPDAAVWVKTDGNAVSQLWRLTSVVTDDGRRIPLPKPIEKRIEISNLEYARLNGLDEGAGVTGNNAPPRPLRQDIDRLTPLWRDHGTAPGGYLGTAVGELEDKARSALRGKAMRQTLTDAGITAEAGWRLDSEGAVCDLEVAKGDTVKKDGKTYKVGVITQGIFGMPVDAAGSAPRTPEDCEKFEEQYGIKPWKAKGIPLA

SEQ ID NO: 326 - protein, 984 aa, Campylobacter coli
MARILAFDIGISSIGWAFSENDELKDCGVRIFTKAENPKTGESLALPRRLARSARKCLARRKARLNHLKHLIANEFKLNYEDYQSFDESLAKAYKGSLISPYELRFRALNELLSKQDFARVILHIAKRRGYDDIKNNGDEEKSEILKAIKQNEEKLVNYQSVGEYLYKEYFQKFKENSKEFINVRNKKESYERCIAQSFLKDELKLIFQKQREFGFSFSKKFEEEVLSVAFYKRALKDFSHLVGNCSFFTDEKRAPKNSPLAFMFVALTRIINLLNNLKNTEGILYTKDDLNALLNEVLKNGTLTYKQTKKLLGLSDDYEFKGEKGTYFIEFKKYKEFIKALGEHNLSQDDLNEIAKDITLIKDEIKLKKALAKYDLNQNQIDSLSKLEFKDHLNISFKALKLITPLMLEGKKYDEACNELNLKVAINEDKKDFLPAFNETYYKDEVTNPVVLRAIKEYRKVLNALLKKYGKVHKINIELAREVGKNHSQRAKIEKEQNENYKAKKDAELECEKLGLKINSKNILKLRLFKEQKEFCAYSGEKIKISDLQDEKMLEIDHIYPYSRSFDDSYMNKVLVFTKQNQEKLNQTPFEAFGNDSAKWQKIEVLAKNLPTKKQKRILDKNYKDKEQKNFKDRNLNDTRYIARLVLNYTKDYLDFLPLSDDENTKLNDTQKGSKVHVEAKSGMLTSALRHTWGFSAKDRNNHLHHAIDAVIIAYANNSIVKAFSDFKKEQESNSAELYAKKISELDYKNKRKFFEPFSGFRQKVLDKIDEIFVSKPERKKPSGALHEETFRKEEEFYQSYGGKEGVLKALELGKIRKVNGKIVKNGDMFRVDIFKHKKTNKFYAVPIYTMDFALKVLPNKAVARSKKGEIKDWILMDENYEFCFSLYKDSLILIQTKDMQEPEFVYYNAFTSSTVSLIVSKHDNKFETLSKNQKILFKNANEKEVIAKSIGIQNLKVFEKYIVSALGEVTKAEFRQREDFKK

SEQ ID NO: 327 - protein, 984 aa, Campylobacter coli
MARILAFDIGISSIGWAFSENDELKDCGVRIFTKAENPKTGESLALPRRLARSARKRLARRKARLNHLKHLIANEFKLNYEDYQSFDESLAKAYKGSLISPYELRFRALNELLSKQDFARVILHIAKRRGYDDIKNNGDEEKGKILKAIKQNEEKLVNYQSVGEYLYKEYFQKFKENSKEFINVRNKKESYERCITQSFLKYELKLIFQKQREFGFSFSKKFEEEVLSVAFYKRALKDFSHLVGNCSFFSDEKRAPKNSPLAFMFVALTRIINLLNNLKNTEGILYTKDDLNALLNEVLKNGTLTYKQTKKLLGLSDDYEFKGEKGTYFIEFKKYKEFIKALGEHNLSQDDLNEIAKDITLIKDEIKLKKALAKYDLNQNQIDSLSKLEFKDHLNISFKALKLITPLMLEGKKYDEACNELNLKVAINEDKKDFLPAFNETYYKDEVTNPVVLRAIKEYRKVLNALLKKYGKVHKINIELAREVGKNYSQRAKIEKEQNENYKAKKDAELECEKLGLKINSKNILKLRLFKEQKEFCAYSGEKIKISDLQDEKMLEIDHIYPYSRSFDDSYMNKVLVFTKQNQEKLNQTPFEAFGNDSAKWQKIEVLAKNLPTKKQKRILDKNYKDKEQKNFKDRNLNDTRYIARLVLNYTKDYLDFLPLSDDENTKLNDTQKGSKVHVEAKSGMLTSALRHTWGFSAKDRNNHLHHAIDAVIIAYANNSIVKAFSDFKKEQESNSAELYAKKISELDYKNKRKFFEPFSGFRQKVLDKIDEIFVSKPERKKPSGALHEETFRKEEEFYQSYGGKEGVLKALELGKIRKVNGKIVKNGDMFRVDIFKHKKTNKFYAVPIYTMDFALKVLPNKAVARSKKGEIKDWILMDENYEFCFSLYKDSLILIQTKDMQEPEFVYYNAFTSSTVSLIVSKHDNKFETLSKNQKILFKNANEKEVIAKSIGIQNLKVFEKYIVSALGEVTKAEFRQREDFKK

SEQ ID NO: 328 - protein, 984 aa, Campylobacter coli
MARILAFDIGISSIGWAFSENDELKDCGVRIFTKAENPKTGESLALPRRLARSARKRLARRKARLNHLKHLIANEFKLNYEDYQSFDESLAKAYKGSLISPYELRFRALNELLSKQDFARVILHIAKRRGYDDIKNNGDEEKSEILKAIKQNEEKLVNYQSVGEYLYKEYFQKFKENSKEFINVRNKKESYERCIAQSFLKDELKLIFQKQREFGFSFSKKFEEEVLSVAFYKRALKDFSHLVGNCSFFTDEKRAPKNSPLAFMFVALTRIINLLNNLKNTEGILYTKDDLNTLLNEVLKNGTLTYKQTKKLLGLSDDYEFKGEKGTYFIEFKKYKEFIKALGEHNLSQDNLNEIAKDITLIKDEIKLKKALAKYDLNQNQIDSLSKLEFKDHLNISFKALKLITPLMLEGKKYDEAYNELNLKVAINEDKKDFLPAFNETYYKDEVTNPVVLRAIKEYRKVLNALLKKYGKVHKINIELAREVGKNHSQRAKIEKEQNENYKAKKDAELECEKLGLKINSKNILKLRLFKEQKEFCAYSGEKIKISDLQDEKMLEIDHIYPYSRSFDDSYMNKVLVFTKQNQEKLNQTPFEAFGNDSAKWQKIEVLAKNLPTKKQKRILDKNYKDKEQKDFKDRNLNDTRYIARLVLNYTKDYLDFLPLSDDENTKLNDTQKGSKVHVEAKSGMLTSALRHTWGFSAKDRNNHLHHAIDAVIIAYANNSIVKAFSDFKKEQESNSAELYAKKISELDYKNKRKFFEPFSGFRQKVLDKIDEIFVSKPERKKPSGALHEETFRKEEEFYQSYGGKEGVLKALELGKIRKVNGKIVKNGDMFRVDIFKHKKTNKFYAVPIYTMDFALKVLPNKAVARSKKGEIKDWILMDENYEFCFSLYKDSLILIQTKDMQEPELVYFNAFTSSTVSLIVSKHDNKFETLSKNQKILFKNANEKEVIAKSIGIQNLKVFEKYIVSALGEVTKAEFRQREDFKK

SEQ ID NO: 329 - protein, 984 aa, Campylobacter coli
MARILAFDIGISSIGWAFSENDELKDCGVRIFTKAENPKTGESLALPRRLARSARKRLARRKARLNHLKHLIANEFKLNYEDYQSFDESLAKAYKGSLISPYELRFRALNELLSKQDFARVILHIAKRRGYDDIKNNGDEEKSEILKAIKQNEEKLVNYQSVGEYLYKEYFQKFKENSKEFINVRNKKESYERCIAQSFLKDELKLIFQKQREFGFSFSKKFEEEVLSVAFYKRALKDFSHLVGNCSFFTDEKRAPKNSPLAFMFVALTRIINLLNNLKNTEGILYTKDDLNALLNEVLKNGTLTYKQTKKLLGLSDDYEFKGEKGTYFIEFKKYKEFIKALGEHNLSQDDLNEIAKDITLIKDEIKLKKALAKYDLNQNQIDSLSKLEFKDHLNISFKALKLITPLMLEGKKYDEACNELNLKVAINEDKKDFLPAFNETYYKDEVTNPVVLRAIKEYRKVLNALLKKYGKVHKINIELAREVGKNYSQRAKIEKEQNENYKAKKDAELECEKLGLKINSKNILKLRLFKEQKEFCAYSGEKIKISDLQDEKMLEIDHIYPYSRSFDDSYMNKVLVFTKQNQEKLNQTPFEAFGNDSAKWQKIEVLAKNLPTKKQKRILDKNYKDKEQKNFKDRNLNDTRYIARLVLNYTKDYLDFLPLSDDENTKLNDTQKGSKVHVEAKSGMLTSALRHTWGFSAKDRNNHLHHAIDAVIIAYANNSIVKAFSDFKKEQESNSAELYAKKISELDYKNKRKFFEPFSGFRQKVLDKIDEIFVSKPERKKPSGALHEETFRKEEEFYQSYGGKEGVLKALELGKIRKVNGKIVKNGDMFRVDIFKHKKTNKFYAVPIYTMDFALKVLPNKAVARSKKGEIKDWILMDENYEFCFSLYKDSLILIQTKDMQEPEFVYYNAFTSSTVSLIVSKHDNKFETLSKNQKILFKNANEKEVIAKSIGIQNLKVFEKYIVSALGEVTKAEFRQREDFKK

SEQ ID NO: 330 - protein, 987 aa, Campylobacter coli
MARILAFDIGISSIGWAFSENDELKDCGVRIFTKAENPKTGESLALPRRLARSARKRLARRKARLNHLKHLIANEFKLNYEDYQSFDESLAKAYKGSLISPYELRFRALNELLSKQDFARVILHIAKRRGYDDIKNNGDEEKSEILKAIKQNEEKLVNYQSVGEYLYKEYFQKFKENSKEFINVRNKKESYERCIAQSFLKDELKLIFQKQREFGFSFSKKFEEEVLSVAFYKRALKDFSHLVGNCSFFTDEKRAPKNSPLAFMFVALTRIINLLNNLKNTEGILYTKDDLNTLLNEVLKNGTLTYKQTKKLLGLSDDYEFKGEKGTYFIEFKKYKEFIKALGEHNLSQDNLNEIAKDITLIKDEIKLKKALAKYDLNQNQIDSLSKLEFKDHLNISFKALKLITPLMLEGKKYDEAYNELNLKVAINEDKKDFLPAFNETYYKDEVTNPVVLRAIKEYRKVLNALLKKYGKVHKINIELAREVGKNHSQRAKIEKEQNENYKAKKDAELECEKLGLKINSKNILKLRLFKEQKEFCAYSGEKIKISDLQDEKMLEIDHIYPYSRSFDDSYMNKVLVFTKQNQEKLNQTPFEAFGNDSAKWQKIEVLAKNLPTKKQKRILDKNYKDKEQKDFKDRNLNDTRYIARLVLNYTKDYLDFLPLSDDENTKLNDTQKGSKVHVEAKSGMLTSALRHTWGFSAKDRNNHLHHAIDAVIIAYANNSIVKAFSDFKKEQESNSAELYAKKISELDYKNKRKFFEPFSGFRQKVLDKIDEIFVSKPERKKPSGALHEETFRKEEEFYQSYGGKEGVLKALELGKIRKVNGKIVKNGDMFRVDIFKHKKTNKFYAVPIYTMDFALKVLPNKAVARSKKGEIKDWILMDENYEFCFSLYKDSLILIQTKDMQEPELVYFNAFTSSTVSLIVSKHDNKFETLSKNQKILFKNANEKEVIAKSIGIQNLKVFEKYIVSALGEVTKAEFRQREDFKNELR

SEQ ID NO: 331 - protein, 984 aa, Campylobacter coli
MARILAFDIGISSIGWAFSENDELKDCGVRIFTKAENPKTGESLALPRRLARSARKRLARRKARLNHLKHLIANEFKLNYEDYQSFDESLAKAYKGSLISPYELRFRALNELLSKQDFARVILHIAKRRGYDDIKNNGDEEKSEILKAIKQNEEKLVNYQSVGEYLYKEYFQKFKENSKEFINVRNKKESYERCIAQSFLKDELKLIFQKQREFGFSFSKKFEEEVLSVAFYKRALKDFSHLVGNCSFFTDEKRAPKNSPLAFMFVALTRIINLLNNLKNTEGILYTKDDLNTLLNEVLKNGTLTYKQTKKLLGLSDDYEFKGEKGTYFIEFKKYKEFIKALGEHNLSQDNLNEIAKDITLIKDEIKLKKALAKYDLNQNQIDSLSKLEFKDHLNISFKALKLITPLMLEGKKYDEAYNELNLKVAINEDKKDFLPAFNETYYKDEVTNPVVLRAIKEYRKVLNALLKKYGKVHKINIELAREVGKNHSQRAKIEKEQNENYKAKKDAELECEKLGLKINSKNILKLRLFKEQKEFCAYSGEKIKISDLQDEKMLEIDHIYPYSRSFDDSYMNKVLVFTKQNQEKLNQTPFEAFGNDSAKWQKIEVLAKNLPTKKQKRILDKNYKDKEQKDFKDRNLNDTRYIARLVLNYTKDYLDFLPLSNDENTKLNDTQKGSKVHVEAKSGMLTSALRHTWGFSAKDRNNHLHHAIDAVIIAYANNSIVKAFSDFKKEQESNSAELYAKKISELDYKNKRKFFEPFSGFRQKVLDKIDEIFVSKPERKKPSGALHEETFRKEEEFYQSYGGKEGVLKALELGKIRKVNGKIVKNGDMFRVDIFKHKKTNKFYAVPIYTMDFALKVLPNKAVARSKKGEIKDWILMDENYEFCFSLYKDSLILIQTKDMQEPELVYFNAFTSSTVSLIVSKHDNKFETLSKNQKILFKNANEKEVIAKSIGIQNLKVFEKYIVSALGEVTKAEFRQREDFKK

SEQ ID NO: 332 - protein, 987 aa, Campylobacter coli
MARILAFDIGISSIGWAFSENDELKDCGVRIFTKAENPKTGESLALPRRLARSARKRLARRKARLNHLKHLIANEFKLNYEDYQSFDESLAKAYKGSLISPYELRFRALNELLSKQDFARVILHIAKRRGYDDIKNSDDKEKGAILKAIKQNEEKLANYQSVGEYLYKEYFQKFKENSKEFTNVRNKKESYERCIAQSFLKDELKLIFKKQREFGFSFSKKFEEEVLSVAFYKRALKDFSHLVGNCSFFTDEKRAPKNSPLAFMFVALTRIINLLNNLKNTEGILYTKDDLNALLNEVLKNGTLTYKQTKKLLGLSDDYEFKGEKGTYFIEFKKYKEFIKALGDHSLSQDDLNEIAKDITLIKDEIKLKKALAKYDLNQNQIDSLSKLEFKDHLNISFKALKLITPLMLEGKKYDEACNELNLKVAINEDKKDFLPAFNETYYKDEVTNPVVLRAIKEYRKVLNALLKKYGKVHKINIELAREVGKNYSQRAKIEKEQNENYKAKKDAELECEKLGLKINSKNILKLRLFKEQKEFCAYSGEKIKISDLQDEKMLEIDHIYPYSRSFDDSYMNKVLVFTKQNQEKLNKTPFEAFGNDSTKWQKIEVLAKNLPEKKQKRILDKNYKDKEQKDFKDRNLNDTRYIARLVLNYTKDYLDFLPLSDDENTKLNDTQKGSKVHVEAKSGMLTSALRHTWGFSTKDRNNHLHHAIDAVIIAYANNSIVKAFSDFKKEQESNSAELYAKKISELDYKNKRKFFEPFSGFRQKVLDKIDEIFVSKPERKKPSGALHEETFRKEEEFYQSYGGKEGVLKALELGKIRKVNGKIVKNGDMFRVDIFKHKKTNKFYAVPIYTMDFALKVLPNKAVARSKKGEIKDWILMDENYEFCFSLYKDSLILIQTKDMQEPEFVYYNAFTSSTVSLIVSKHDNKFETLSKNQKILFKNANEKEVIAKSIGIQNLKVFEKYIVSALGEVTKAEFRQREDFKNELR

SEQ ID NO: 333 - protein, 984 aa, Campylobacter coli
MARILAFDIGISSIGWAFSENDELKDCGVRIFTKAENPKTGESLALPRRLARSARKRLARRKARLNHLKHLIANEFKLNYEDYQSFDESLAKAYKGSLISPYELRFRALNELLSKQDFARVILHIAKRRGYDDIKNSDDKEKGAILKAIKQNEEKLTNYQSVGEYLYKEYFQKFKENSKEFTNVRNKKESYERCIAQSFLKDELKLIFKKQREFGFSFSKKFEEEVLSVAFYKRALKDFSHLVGNCSFFTDEKRAPKNSPLAFMFVALTRIINLLNNLKNTEGILYTKDDLNALLNEVLKNGTLTYKQTKKLLGLSDDYEFKGEKGTYFIEFKKYKEFIKALGDHSLSQDDLNEIAKDITLIKDEIKLKKALAKYDLNQNQIDSLSKLEFKDHLNISFKALKLITPLMLEGKKYDEACNELNLKVAINEDKKDFLPAFNETYYKDEVTNPVVLRAIKEYRKVLNALLKKYGKVHKINIELAREVGKNYSQRAKIEKEQNENYKAKKDAELECEKLGLKINSKNILKLRLFKEQKEFCAYSGEKIKISDLQDEKMLEIDHIYPYSRSFDDSYMNKVLVFTKQNQEKLNQTPFEAFGNDSAKWQKIEVLAKNLPTKKQKRILDKNYKDKEQKDFKDRNLNDTRYIARLVLNYTKDYLDFLPLSDDENTKLNDTQKGSKVHVEAKSGMLTSALRHTWGFSAKDRNNHLHHAIDAVIIAYANNSIVKAFSDFKKEQESNSAELYAKKISELDYKNKRKFFEPFSGFRQKVLDKIDEIFVSKPERKKPSGALHEETFRKEEEFYQSYGGKEGVLKALELGKIRKVNGKIVKNGDMFRVDIFKHKKTNKFYAVPIYTMDFALKVLPNKAVARSKKGEIKDWILMDENYEFCFSLYKDSLILIQTKDMQEPEFVYYNAFTSSTVSLIVSKHDNKFETLSKNQKILFKNANEKEVIAKSIGIQNLKVFEKYIVSALGEVTKAEFRQREDFKK

SEQ ID NO: 334 - protein, 965 aa, Campylobacter coli
MKIIGFNLGIANIGWALRENDEIIDCGVRVFDIPENPKNGNSLALERRENKARMKIVKRKKARMLATKTFLKKELNVDLSKLFLIGSTQSIYELRTKALSSLISKEELSAIILHIAKHRGYDDSALKNENGTIIEALNKNKEAMLKFKSVGEYFYKNFVQNKEVKKIRNTTEDYSNSVPRSLLKQELDLILDKQKELGLIKNADFKAKLFEIIFFKRPLKDFSNKIGNCIFFENEKRAAKNTISACEFVALGKVVNLLKSIEKDIGIVYEKDSINEIMSIILDKTSISYKKIRDILNLPQDINFKGLDYSKNNVENSKLVDLKKLNEFKKALGDGFTNLDKDILDSIATDITLTKDTATLKEKLKNYNVLNAEQIEKLSELVFNDHINLSLKALKQIIPLMYEGKRYDEACELCNFTIAKNQEKNEYLPLFEKTRFAKDISSPVVIRAICEFRKLLNDIIRRYGSVHKIHLELTRDFGISFNDRKKIIKEIEQNEQSRIKALETIKELKLEETSKNIQIVRLFEDQKGICPYSGLKMDLKCLDELVIDYIRPYNRSLDDSYSNKVLTFKKLNDLKQGKTPFEAFGEDEKLWAEINERIKEYNGKKRFKIFDKFFKDKKPFDFTEQTLQDTRWLTKLVASYLNEYLSFLPISEDENTALGYGEKGSKQHVILSSGMITQMLRNFWYLGFKNHKDYKNNAMDAIIVAFTTNSIIFTFNNFKKELDLAKAEFYANKISESDYLLKRKFLPPFSGFKEQALEKVKNIFVSHSLKIKNKGTLHELTPLKIKELKNTYGDLDLAVKLGKIRKYNDKYYANAKGSLVRTDLFADKENKFHAVSIYKADFSTKKLPNKTPATTSNGETKEGIEMNENYNFCMSLYKNTPISVKIKGMKEPIICYYHGFNTSGSKITYKKHDNNYHNLSEDEMVVFRKNDKESIVVGKILEIKKYSISPSGELSLIENEERKWF

SEQ ID NO: 335 - protein, 965 aa, Campylobacter coli
MKIIGFNLGIANIGWALRENDEIIDCGVRVFDIPENPKNGNSLALERRENKARMKIVKRKKARMLATKTFLKKELNVDLSKLFLIGSTQSIYELRTKALSSLISKEELSAIILHIAKHRGYDDSALKNENGTIIEALNKNKEAMLKFKSVGEYFYKNFVQNKEVKKIRNTTEDYSNSVPRSLLKQELDLILDKQKELGLIKNADFKAKLFEIIFFKRPLKDFSNKIGNCIFFENEKRAAKNTISACEFVALGKVVNLLKSIEKDIGIVYEKDSINEIMSIILDKTSISYKKIRDILNLPQDINFKGLDYSKNNAENSKLVDLKKLNEFKKALGDGFANLDKDILDSIATDITLTKDTATLKEKLKNYNVLNAEQIEKLSELVFNDHINLSLKALKQIIPLMYEGKRYDEACELCNFTIAKNQEKNEYLPLFEKTRFAKDISSPVVIRAICEFRKLLNDIIRRYGSVHKIHLELTRDFGISFNDRKKIIKEIEQNEQSRIKALETIKELKLEETSKNIQIVRLFEDQKGICPYSGLKMDLKCLDELVIDYIRPYNRSLDDSYSNKVLTFKKLNDLKQGKTPFEAFGEDEKLWAEINERIKEYNGKKRFKIFDKFFKDKKPFDFTEQTLQDTRWLTKLVASYLNEYLSFLPISEDENTALGYGEKGSKQHVVLSSGMITQMLRNFWYLGFKNHKNYKNNAMDAIIVAFTTNSIIFAFNNFKKELDLAKAEFYANKISESDYLLKRKFLPPFSGFKEQALEKVKNIFVSHSLKIKNKGTLHELTPLKIKELKNTYGDLDLAVKLGKIRKYNDKYYANTKGSLVRTDLFVDKENKFHAVSIYKADFSTKKLPNKTPATTSNGETKEGIEMNENYNFCMSLYKNTPVSVKIKGMKEPIICYYHGFNTSGSKITYKKHDNNYHNLSEDEMVVFRKNDKESIVVGKILEIKKYSISPSGELSLIENEKRKWF

SEQ ID NO: 336 - protein, 965 aa, Campylobacter coli
MKIIGFNLGIANIGWALRENDEIIDCGVRVFDIPENPKNGNSLALERRENKARMKIVKRKKARMLATKTFLKKELNVDLSKLFLIGSTQSIYELRTKALSSLISKEELSAIILHIAKHRGYDDSALKNENGTIIEALNKNKEAMLKFKSVGEYFYKNFVQNKEVKKIRNTTEDYSNSVPRSLLKQELDLILDKQKELGLIKNADFKEKLFEIIFFKRPLKDFSNKIGNCIFFENEKRAAKNTISACEFVALGKVVNLLKSIEKDIGIVYEKDSINEIMSIILDKTSISYKKIRDILNLPQDINFKGLDYSKNNAENSKLVDLKKLNEFKKALGDGFANLDKDILDSIATDITLTKDTATLKEKLKNYNVLNAEQIEKLSELVFNDHINLSLKALKQIIPLMYEGKRYDEACELCNFTIAKNQEKNEYLPLFEKTRFAKDISSPVVIRAICEFRKLLNDIIRRYGSVHKIHLELTRDFGISFNDRKKIIKEIEQNEQSRIKALETIKELKLEETSKNIQIVRLFEDQKGICPYSGLKMDLKCLDELVIDYIRPYNRSLDDSYSNKILTFKKLNDLKQGKTPFEAFGEDEKLWAEINERIKEYNGKKRFKIFDKFFKDKKPFDFTEQTLQDTRWLTKLVASYLNEYLLFLPINEDENTALGYGEKGSKQHVVLSSGMITQMLRNFWYLGFKNHKDYKNNAMDAIIVAFTTNSIIFAFNNFKKELDLAKAEFYANKISESDYLLKRKFLPPFSGFKEQALEKVKNIFVSHSLKIKNKGTLHELTPLKIKELKNTYGDLDLAVKLGKIRKYNDKYYANAKGSLVRTDLFADKENKFHAVSIYKADFSTKKLPNKTPATTSNGETKEGIEMNENYNFCMSLYKNTPISVKIKGMKEPIICYYHGFNTSGSKITYKKHDNNYHNLSEDEMVVFRKNDKESIVVGKILEIKKYSISPSGELSLIENEERKWF

SEQ ID NO: 337 - protein, 933 aa, Campylobacter coli
MKIIGFNLGIANIGWALRENDEIIDCGVRVFDIPENPKNGNSLALERRENKARMKIVKRKKARMLATKTFLKKELNVDLSKLFLIGSTQSIYELRTKALSSLISKEELSVIILHIAKHRGYDDSALKNENGTIIEALNKNKETMLKFKSVGEYFYKNFVQNKEVKKIRNTTEDYSNSVPRSLLKQELDLILDRQKELGLIKNADFKAKLFEIIFFKRPLKDFSNKIGNCIFFENEKRAAKNTISACEFVALGKVVNLLKSIEKDIGIVYEKDSINEIMSIILDKTSISYKKIRDILNLPQDINFKGLDYSKNNVENSKLVDLKKLNEFKKALGDGFTNLDKDILDSIATDITLTKDTATLKEKLKNYNVLNAEQIEKLSELVFNDHINLSLKALKQIIPLMYEGKRYDEACELCNFTIAKNQEKNEYLPLFEKTRFAKDISSPVVIRAICEFRKLLNDIIRRYGSVHKIHLELTRDFGISFNDRKKIIKEIEQNEQSRIKALETIKELKLEETSKNIQIVRLFEDQKGICPYSGLKMDLKCLDELVIDYIRPYNRSLDDSYSNKVLTFKKLNDLKQGKTPFEAFGEDEKLWAEINERIKEYNGKKRFKIFDKFFKDKKPFDFTEQTLQDTRWLTKLVASYLNEHLSFLPISEDENTALGYGEKGSKQHVILSSGMITQMLRNFWYLGFKNHKDYKNNAMDAIIVAFTTNSIIFTFNNFKKELDLAKAEFYANKISESDYLLKRKFLPPFSGFKEQALEKVKNIFVSHSLKIKNKGTLHELTPLKIKELKNTYGDLDLAVKLGKIRKYNDKYYANANGSLVRSDLFIDKKNKFHAVPIYKADFSTKKLPNKTPATTSNGETKEGIEMNENYNFCMSLYKNTPISVKIKGMKESIICYYHGFNTSGSKITYKKHDNNYHNLSEDEMVVFRKNDKE

SEQ ID NO: 338 - protein, 666 aa, Campylobacter jejuni
KGEKGTYFIEFKKYKEFIKALDEHSLSQDDLNEIAKDITLIKDEIKLKKALAKYDLKENQIDSLSKLEFKDHLNISFKALKLITPLMLEGKKYDEACNELNLKVAINEDKKDFLPAFNETYYKDEVTNPVVLRAIKEYRKILNALLKKYGKVHKINIELAREVGKNHSQRAKIEKEQNENYKAKKDAELECEKLGLKINSKNILKLRLFKEQKEFCVYSGEKIKLSDLQDEKMLEIDHIYPYSRSFDDSYMNKVLVFAKQNQEKLNKTPFEAFGNDSTKWQKIEVLTKNLPTKKQKRILDKNYKDKEQKDFKDRNLNDTRYIARLVLNYTKDYLDFLPLSDDENTKLNDTQKGSKVHVEAKSGMLTSALRHTWGFSTKDRNNHLHHAIDAAIIAYANNSIVKAFSDFKKEQESNSAELYAKKISELDYKNKRKFFEPFSGFRQKVLDKIDEIFVSKPERKKPSGALHEETFRKEEEFYQSYGGKEGVLKALELGKIRKVNGKIVKNGDMFRVDIFKHKKTNKFYAVPIYTMDFALKVLPNKAVARSKKGEIKDWILMDEDYEFCFSLYKDSLILIQTKDMQEPELVYFNAFTSSTVSLIVSKHDNKFETLSKNQKILFKNANEKEVIAKSIGIQNLKVFEKYIVSALGEVTKAEFRQREDFKNELR

SEQ ID NO: 339 - protein, 190 aa, Campylobacter jejuni
MAFDIGISSIGWAFSENDELKDCGVRIFTKVENPKTGESLALPRRLARSARKRLARRKARLNHLKHLIANEFKLNYEDYQSFDESLAKAYKGSLISPYELRFRALNELLSKQDFARVILHIAKRRGYDDIKNSDDKEKGAILKAIKQNEEKLANYQSVGEYLYKEYFQKFKENSKEFTNVRNKKKVMNAA

SEQ ID NO: 340 - protein, 985 aa, Campylobacter jejuni
MAKILAFDIGISSIGWAFVENDELKDCGVRIFTKAENPKTGESLALPRRLARSARKRLARRKARLNHLKHLIANEFKLNYEDYQSFDESLAKAYKGTLISPYELRFKALNELLSKQDLARVILHIAKRRGYDNIKNSDDKEKGAILKAVKENEEKLANYKSVGEYLYKEYFQKFKENSKEFINVRNKKESYERCIAQSFLKDELKLIFQKQREFGFNFSKKFEEEVLSVAFYKRALKDFSHLVGNCSFFVDEKRAPKNSPLAFEFVALTRIVNLLNNLNKNNSYIKDDLNALLSEVLKNGTLTYKQTKKILGLSDDYEFKGQKGNYFIEFKKYKEFIKALCEHNLNQDDLNEIAKDITLVKDETKLKKALAKYDLNQNQIENLSKIEFKDHLNISFKALKLIVPLMREGKKYDEVCNELNLKTAINEDKKEFLPAFNETYYKDEVNNPVVLRAIKEYRKVLNSLLKKYGKVHKINIELAREVGKNHRERSKIEKEQNENFKAKKDAELECEKLGLKINSKNILKLRLFKEQKEFCVYSGEKIKISDLQDEKMLEIDHIYPYSRSFDDSYMNKVLVFTKQNQEKLNKTPFEAFGKDDVKWQKIETLAKNLPAKKQKRILDKNYKDKEQKDFKDRNLNDTRYIARLVLNYTKDYLEFLPLSDDENIKLNDTQKGSKVHVEAKSGMLTSVLRHTWGFSTKDRNNHLHHAIDAVIIAYANASVVKAFSDFKKEQENYTAELYAKKINELDFKNKRKFFEPFSNFRQKVLEKIDEIFVSKPERKKPSGALHEETFYKEEEFYKEYGGKEGVLKALELGKIRKVNGKIVSNANMFRVDIFKYKKTNKFYAVPIYTMDFALGILPNKAVVGGKDKQGIIKDWLLMDENYEFCFSLYKDSLILLQTKDMQEPELVYFKSFKSSTAGLVVSKHDNKFENLNENQKKLFKSANEKKVVAEGIGIQNLKVFEKYIVSALGEITKAEIKERENFKKK

SEQ ID NO: 341 - protein, 987 aa, Campylobacter jejuni
MARILAFDIGISSIGWAFSENDELKDCGVRIFTKAENPKTGESLALPRCLARSARKRLARRKARLNHLKHLIANEFKLNYEDYQSFDESLAKAYKGSLISPYELRFRALNELLSKQDFARVILHIAKRRGYDDIKNNGDEEKGEILKAIKQNEEKLVSYQSVGEYLYKEYFQKFKENSKEFINVRNKKESYERCIAQSFLKDELKLIFQKQRKFGFSFSKKFEEEVLSVAFYKRALKDFSHLVGNCSFFTDEKRAPKNSPLAFMFVALTRIINLLNNLKNTEGILYTKDDLNTLLNEVLKNGTLTYKQTKKLLGLSNDYEFKGEKGTYFIEFQKYKEFVKALGEHNLSQDDLNEIAKDITLIKDEIKLKKALAKYDLNQNQIDSLSKLEFKDHLNISFKALKLITPLMLEGKKYDEACNELNLKVAINEDKKDFLPAFNETYYKDEVTNPVVLRAIKEYRKVLNALLKKYGKVHKINIELAREVGKNHSQRAKIEKEQNENYKAKKDAELECEKLGLKINSKNILKLRLFKEQKEFCVYSGEKIKISDLQDEKMLEIDHIYPYSRSFDDSYMNKVLVFTKQNQEKLNKTPFETFGNDRVKWQKIEVLAKNLPTKKQKRILDKNYKDKEQKDFKDRNLNDTRYIARLVLNYTKDYLDFLPLSDDENTKLNDTQKGSKVHVEAKSGMLTSTLRHTWGFSTKDRNNHLHHAIDAAIIAYANNSIVKAFSDFKKEQESNTAELYAKKISELDYKNKRKFFEPFSGFRQKLLDKIDEIFVSKPERKKPSGALHEETFRKEEEFYQSYGGKEGVLKALELGKIRKVNGKIVSNGDMFRVDIFKHKKTNKFYAVPIYTMDFALKVLPNKAVVQGKDKKSGLIKDWILMDENYEFCFSLYKDSLILIQTKDMQEPELVYYERLDSSNASLTVSKHDNKFETLSKNQKILFKNANEKEVIAKSIGIQNLKVFEKYIVSALGEVTKAEFRQREDFKK

SEQ ID NO: 342 - protein, 987 aa, Campylobacter jejuni
MARILAFDIGISSIGWAFSENDELKDCGVRIFTKAENPKTGESLALPRRLARSARKRLARRKARLNHLKHLIANEFKLNYEDYQSFDEGLAKAYKGSLISPYELRFRALNELLSKQDFARVILHIAKRRGYDDIKNNGDEEKSEILKAIKQNEEKLVNYQSVGEYLYKEYFQKFKENSKEFINVRNKKESYERCIAQSFLKDELKLIFQKQREFGFSFSKKFEEEVLSVAFYKRALKDFSHLVGNCSFFTDEKRAPKNSPLAFMFVALTRIINLLNNLKNTEGILYTKDDLNTLLNEVLKNGTLTYKQTKKLLGLSDDYEFKGEKGTYFIEFKKYKEFIKALGEHNLSQDNLNEIAKDITLIKDEIKLKKALAKYDLNQNQIDSLSKLEFKDHLNISFKALKLITPLMLEGKKYDEAYNELNLKVAINEDKKDFLPAFNETYYKDEVTNPVVLRAIKEYRKVLNALLKKYGKVHKINIELAREVGKNHSQRAKIEKEQNENYKAKKDAELECEKLGLKINSKNILKLRLFKEQKEFCAYSGEKIKISDLQDEKMLEIDHIYPYSRSFDDSYMNKVLVFTKQNQEKLNQTPFEAFGNDSAKWQKIEVLAKNLPTKKQKRILDKNYKDKEQKDFKDRNLNDTRYIARLVLNYTKDYLDFLPLSDDENTKLNDTQKGSKVHVEAKSGMLTSALRHTWGFSAKDRNNHLHHAIDAVIIAYANNSIVKAFSDFKKEQESNSAELYAKKISELDYKNKRKFFEPFSGFRQKVLDKIDEIFVSKPERKKPSGALHEETFRKEEEFYQSYGGKEGVLKALELGKIRKVNGKIVKNGDMFRVDIFKHKKTNKFYAVPIYTMDFALKVLPNKAVVQGKDKKSGLIKDWILMDENYEFCFSLYKDSLILIQTKDMQEPELVYFNAFTSSTVSLIVSKHDNKFETLSKNQKILFKNANEKEVIAKSIGIQNLKVFEKYIVSALGEVTKAEFRQREDFKK

SEQ ID NO: 343 - protein, 961 aa, Campylobacter jejuni
MARILAFDIGISSIGWAFSENDELKDCGVRIFTKAENPKTGESLALPRRLARSARKRLARRKARLNHLKHLIANEFKLNYEDYQSFDESLAKAYKGSLISPYELRFRALNELLSKQDFARVILHIAKRRGYDDIKNNGDEEKGKILKAIKQNEEKLVNYQSVGEYLYKEYFQKFKENSKEFINVRNKKESYERCITQSFLKYELKLIFQKQREFGFSFSKKFEEEVLSVAFYKRALKDFSHLVGNCSFFSDEKRAPKNSPLAFMFVALTRIINLLNNLKNTEGILYTKDDLNALLNEVLKNGTLTYKQTKKLLGLSDDYEFKGEKGTYFIEFKKYKEFIKALGEHNLSQDDLNEIAKDITLIKDEIKLKKALAKYDLNQNQIDSLSKLEFKDHLNIGFKALKLITPLMLEGKKYDEACNELNLKVAINEDKKDFLPAFNETYYKDEVTNPVVLRAIKEYRKVLNALLKKYGKVHKINIELAREVGKNHSQRAKIEKEQNENYKAKKDAELECEKLGLKINSKNILKLRLFKEQKEFCAYSGEKIKLSDLQDEKMLEIDHIYPYSRSFDDSYMNKVLVFTKQNQEKLNKTPFEAFGNDNVKWQKIEVLAKNLPEKKQKRILDKNYKDKEQKDFKDRNLNDTRYIARLVLNYTKDYLDFLPLSDDENTKLKGSKVHVEAKSGMLTSALRHTWGFSTKDRNNHLHHAIDAAIIAYANNSIVKDFSDFKKEQESNSAELYAKKISELDYKNKRKFFEPFSGFRQKVLDKIDEIFVSKPERKKPSGALHEETFRKEEEFYQSYGGKEGVLKALELGKIRKVNGKIVKNGDMFRVDIFKHKKTNKFYAVPIYTMDFALKVLPNKAVARSKKGEIKDWILMDENYEFCFSLYKDSLILIQTKDMQEPELVYFNAFTSSTVSLIVSKHDNKFETLSKNLKVFEKYIVSALGEVTKAEFRQREDFKNELR

SEQ ID NO: 344 - protein, 984 aa, Campylobacter jejuni
MARILAFDIGISSIGWAFSENDELKDCGVRIFTKAENPKTGESLALPRRLARSARKRLARRKARLNHLKHLIANEFKLNYEDYQSFDESLAKAYKGSLISPYELRFRALNELLSKQDFARVILHIAKRRGYDDIKNNGDEEKGKILKAIKQNEEKLVNYQSVGEYLYKEYFQKFKENSKEFINVRNKKESYERCITQSFLKYELKLIFQKQREFGFSFSKKFEEEVLSVAFYKRALKDFSHLVGNCSFFTDEKRAPKNSPLAFMFVALTRIINILNNLKNTEGILYTKDDLNALLNEVLKNGTLTYKQTKKLLGLSDDYEFKGEKGTYFIEFKKYKEFIKALGEHNLSQDDLNEIAKDITLIKDEIKLKKALAKYDLNQNQIDSLSKLEFKDHLNISFKALKLITPLMLEGKKYDEACNELNLKVAINEDKKDFLPAFNETYYKDEVTNPVVLRAIKEYRKILNALLKKYGKVHKINIELAREVGKNHSQRAKIEKEQNENYKAKKDAEIECEKLGLKINSKNILKLRLFKEQKEFCAYSGEKIKISDLQDEKMLEIDHIYPYSRSFDDSYMNKVLVFTKQNQEKLNQTPFEAFGNDSAKWQKIEVLAKNLPTKKQKRILDKNYKDKEQKDFKDRNLNDTRYIARLVLNYTKDYLDFLPLSDDENTKLNDTQKGSKVHVEAKSGMLTSALRHTWGFSAKDRNNHLHHAIDAVIIAYANNSIVKAFSDFKKEQESNSAELYAKKISELDYKNKRKFFEPFSGFRQKVLDKIDEIFVSKPERKKPSGALHEETFRKEEEFYQSYGGKEGVLKALELGKIRKVNGKIVKNGDMFRVDIFKHKKTNKFYAVPIYTMDFALKVLPNKAVARSKKGEIKDWILMDENYEFCFSLYKDSLILIQTKDMQEPEFVYYNAFTSSTVSLIVSKHDNKFETLSKNQKILFKNANEKEVIAKSIGIQNLKVFEKYIVSALGEVTKAEFRQREDFKK

SEQ ID NO: 345 - protein, 987 aa, Campylobacter jejuni
MARILAFDIGISSIGWAFSENDELKDCGVRIFTKAENPKTGESLALPRRLARSARKRLARRKARLNHLKHLIANEFKLNYEDYQSFDESLAKAYKGSLISPYELRFRALNELLSKQDFARVILHIAKRRGYDDIKNNGDEEKGKILKAIKQNEEKLVSYQSVGEYLYKEYFQKFKENSKEFINVRNKKESYERCIAQSFLKDELKLIFQKQREFGFSFSKKFEEEVLSVAFYKRALKDFSHLVGNCSFLLMKKERQKNSPLAFMFVALTRIINLLNNLKNTEGILYTKDDLNTLLNEALKNGTLTYKQTKKLLGLSNDYEFKGEKGTYFIEFQKYKEFVKALGEHNLSQDDLNEIAKDITLIKDEIKLKKALAKYDLNQNQIDSLSKLEFKDHLNISFKALKLITPLMLEGKKYDEACNELNLKVAINEDKKDFLPAFNETYYKDEVTNPVVLRAIKEYRKVLNALLKKYGKVHKINIELAREVGKNHSQRAKIEKEQNENYKAKKDAELECEKLGLKINSKNILKLRLFKEQKEFCVYSGEKIKISDLQDEKMLEIDHIYPYSRSFDDSYMNKVLVFTKQNQEKLNKTPFETFGNDRVKWQKIEVLAKNLPTKKQKRILDKNYKDKEQKDFKDRNLNDTRYIARLVLNYTKDYLDFLPLSDDENTKLNDTQKGSKVHVEAKSGMLTSTLRHTWGFSTKDRNNHLHHAIDAAIIAYANNSIVKAFSDFKKEQESNTAELYAKKISELDYKNKRKFFEPFSGFRQKLLDKIDEIFVSKPERKKPSGALHEETFRKEEEFYQSYGGKEGVLKALELGKIRKVNGKMVKNGDMFRVDIFKHKKTNKFYAVPIYTMDFALKVLPNKAVVQGKDKKSGLIKDWILMDENYEFCFSLYKDSLILIQTKDMQEPELVYYERLDSSNASLTVSKHDNKFETLSKNQKILFKNANEKEVIAKSIGIQNLKVFEKYIVSALGEVTKAEFRQREDFKK

SEQ ID NO: 346 - protein, 987 aa, Campylobacter jejuni
MARILAFDIGISSIGWAFSENDELKDCGVRIFTKAENPKTGESLALPRRLARSARKRLARRKARLNHLKHLIANEFKLNYEDYQSFDESLAKAYKGSLISPYELRFRALNELLSKQDFARVILHIAKRRGYDDIKNNGDEEKSEILKAIKQNEEKLVNYQSVGEYLYKEYFQKFKENSKEFINVRNKKESYERCIAQSFLKDELKLIFQKQREFGFSFSKKFEEEVLSVAFYKRALKDFSHLVGNCSFFTDEKRAPKNSPLAFMFVALTRIINLLNNLKNTEGILYTKDDLNTLLNEVLKNGTLTYKQTKKLLGLSDDYEFKGEKGTYFIEFKKYKEFIKALGEHNLSQDNLNEIAKDITLIKDEIKLKKALAKYDLNQNQIDSLSKLEFKDHLNISFKALKLITPLMLEGKKYDEAYNELNLKVAINEDKKDFLPAFNETYYKDEVTNPVVLRAIKEYRKVLNALLKKYGKVHKINIELAREVGKNHSQRAKIEKEQNENYKAKKDAELECEKLGLKINSKNILKLRLFKEQKEFCAYSGEKIKISDLQDEKMLEIDHIYPYSRSFDDSYMNKVLVFTKQNQEKLNQTPFEAFGNDSAKWQKIEVLAKNLPTKKQKRILDKNYKDKEQKDFKDRNLNDTRYIARLVLNYTKDYLDFLPLSDDENTKLNDTQKGSKVHVEAKSGMLTSALRHTWGFSAKDRNNHLHHAIDAVIIAYANNSIVKAFSDFKKEQESNSAELYAKKISELDYKNKRKFFEPFSGFRQKVLDKIDEIFVSKPERKKPSGALHEETFRKEEEFYQSYGGKEGVLKALELGKIRKVNGKIVKNGDMFRVDIFKHKKTNKFYPVPIYTMDFALKVLPNKAVVQGKDKKSGLIKDWILMDENYEFCFSLYKDSLILIQTKDMQEPELVYFNAFTSSTVSLIVSKHDNKFETLSKNQKILFKNANEKEVIAKSIGIQNLKVFEKYIVSALGEVTKAEFRQREDFKK

SEQ ID NO: 347 - protein, 987 aa, Campylobacter jejuni
MARILAFDIGISSIGWAFSENDELKDCGVRIFTKAENPKTGESLALPRRLARSARKRLARRKARLNHLKHLIANEFKLNYEDYQSFDESLAKAYKGSLISPYELRFRALNELLSKQDFARVILHIAKRRGYDDIKNNGDEEKSEILKAIKQNEEKLVNYQSVGEYLYKEYFQKFKENSKEFINVRNKKESYERCIAQSFLKDELKLIFQKQREFGFSFSKKFEEEVLSVAFYKRALKDFSHLVGNCSFFTDEKRAPKNSPLAFMFVALTRIINLLNNLKNTEGILYTKDDLNTLLNEVLKNGTLTYKQTKKLLGLSDDYEFKGEKGTYFIEFKKYKEFIKALGEHNLSQDNLNEIAKDITLIKDEIKLKKALAKYDLNQNQIDSLSKLEFKDHLNISFKALKLITPLMLEGKKYDEAYNELNLKVAINEDKKDFLPAFNETYYKDEVTNPVVLRAIKEYRKVLNALLKKYGKVHKINIELAREVGKNHSQRAKIEKEQNENYKAKKDAELECEKLGLKINSKNILKLRLFKEQKEFCAYSGEKIKISDLQDEKMLEIDHIYPYSRSFDDSYMNKVLVFTKQNQEKLNQTPFEAFGNDSAKWQKIEVLAKNLPTKKQKRILDKNYKDKEQKDFKDRNLNDTRYIARLVLNYTKDYLDFLPLSDDENTKLNDTQKGSKVHVEAKSGMLTSALRHTWGFSAKDRNNHLHHAIDAVIIAYANNSIVKAFSDFKKEQESNSAELYAKKISELDYKNKRKFFEPFSGFRQKVLDKIDEIFVSKPERKKPSGALHEETFRKEEEFHQSYGGKEGVLKALELGKIRKVNGKIVKNGDMFRVDIFKHKKTNKFYAVPIYTMDFALKVLPNKAVVQGKDKKSGLIKDWILMDENYEFCFSLYKDSLILIQTKDMQEPELVYFNAFTSSTVSLIVSKHDNKFETLSKNQKILFKNANEKEVIAKSIGIQNLKVFEKYIVSALGEVTKAEFRQREDFKK

SEQ ID NO: 348 - protein, 987 aa, Campylobacter jejuni
MARILAFDIGISSIGWAFSENDELKDCGVRIFTKAENPKTGESLALPRRLARSARKRLARRKARLNHLKHLIANEFKLNYEDYQSFDESLAKAYKGSLISPYELRFRALNELLSKQDFARVILHIAKRRGYDDIKNNGDEEKSEILKAIKQNEEKLVNYQSVGEYLYKEYFQKFKENSKEFINVRNKKESYERCIAQSFLKDELKLIFQKQREFGFSFSKKFEEEVLSVAFYKRALKDFSHLVGNCSFFTDEKRAPKNSPLAFMFVALTRIINLLNNLKNTEGILYTKDDLNTLLNEVLKNGTLTYKQTKKLLGLSDDYEFKGEKGTYFIEFKKYKEFIKALGEHNLSQDNLNEIAKDITLIKDEIKLKKALAKYDLNQNQIDSLSKLEFKDHLNISFKALKLITPLMLEGKKYDEAYNELNLKVAINEDKKDFLPAFNETYYKDEVTNPVVLRAIKEYRKVLNALLKKYGKVHKINIELAREVGKNHSQRAKIEKEQNENYKAKKDAELECEKLGLKINSKNILKLRLFKEQKEFCAYSGEKIKISDLQDEKMLEIDHIYPYSRSFDDSYMNKVLVFTKQNQEKLNQTPFEAFGNDSAKWQKIEVLAKNLPTKKQKRILDKNYKDKEQKDFKDRNLNDTRYIARLVLNYTKDYLDFLPLSDDENTKLNDTQKGSKVHVEAKSGMLTSALRHTWGFSAKDRNNHLHHAIDAVIIAYANNSIVKAFSDFKKEQESNSAELYAKKISELDYKNKRKFFEPFSGFRQKVLDKIDEIFVSKPERKKPSGALHEETFRKEEEFYQSYGGKEGVLKALELGKIRKVNGKIVKNGDMFRVDIFKHKKTNKFYAVPIYTMDFALKVLPNKAVVQGKDKKSGLIKDWILMDENYEFCFSLYKDSLILIQTKDMQEPELVYFNAFTSSTVSLIVSKHDNKFETLSKNQKILFKNANEKEVIAKSIGIQNLKVFEKYIVSALGEVTKAEFRQREDFKK

SEQ ID NO: 349 - protein, 861 aa, Campylobacter jejuni
MARILAFDIGISSIGWAFSENDELKDCGVRIFTKAENPKTGESLALPRRLARSARKRLARRKARLNHLKHLIANEFKLNYEDYQSFDESLAKAYKGSLISPYELRFRALNELLSKQDFARVILHIAKRRGYDDIKNNGDEEKSEILKAIKQNEEKLVNYQSVGEYLYKEYFQKFKENSKEFINVRNKKESYERCITQSFLKDELKLIFQKQREFGFSFSKKFEEEVLSVAFYKRALKDFSHLVGNCSFFTDEKRAPKNSPLAFMFVALTRIINILNNLKNTEGILYTKDDLNALLNEVLKNGTLTYKQTKKLLGLSDDYEFKGEKGTYFIEFKKYKEFIKALGEHNLSQDDLNEIAKDITLIKDEIKLKKALAKYDLNQNQIDSLSKLEFKDHLNISFKALKLITPLMLEGKKYDEACNELNLKVAINEDKKDFLPAFNETYYKDEVTNPVVLRAIKEYRKILNALLKKYGKVHKINIELAREVGKNHSQRAKIEKEQNENYKAKKDAEIECEKLGLKINSKNILKLRLFKEQKEFCAYSGEKIKLSDLQDEKMLEIDHIYPYSRSFDDSYMNKVLVFTKQNQEKLNKTPFEAFGNDSTKWQKIEVLAKNLPEKKQKRILDKNYKDKEQKDFKDRNLNDTRYIARLVLNYTKDYLDFLPLSDDENTKLNDTQKGSKVHVEAKSGMLTSALRHTWGFSAKDRNNHLHHAIDAAIIAYANNSIVKAFSDFKKEQESNSVELYAKKISELDYKNKRKFFEPFSGFRQKVLDKIDEIFVSKPERKKPSGALHEETFRKEEEFYQSYGGKEGVLKALELGKIRKVNGKIVKNGDMFRVDIFKHKKTNKFLCCANLYYGFCFKSITK

SEQ ID NO: 350 - protein, 462 aa, Campylobacter jejuni
MARILAFDIGISSIGWAFSENDELKDCGVRIFTKAENPKTGESLALPRRLARSARKRLARRKARLNHLKHLIANEFKLNYEDYQSFDESLAKAYKGSLISPYELRFRALNELLSKQDFARVILHIAKRRGYDDIKNNGDEEKSEILKAIKQNEEKLVNYQSVGEYLYKEYFQKFKENSKEFINVRNKKESYERCITQSFLKDELKLIFQKQREFGFSFSKKFEEEVLSVAFYKRALKDFSHLVGNCSFFTDEKRAPKNSPLAFMFVALTRIINILNNLKNTEGILYTKDDLNALLNEVLKNGTLTYKQTKKLLGLSDDYEFKGEKGTYFIEFKKYKEFIKALGEHNLSQDDLNEIAKDITLIKDEIKLKKALAKYDLNQNQIDSLSKLEFKDHLNISFKALKLITPLMLEGKKYDEACNELNLKVAINEDKKDFLPAFNETYYKDEVTNPVVLRAIKEYRKS

SEQ ID NO: 351 - protein, 984 aa, Campylobacter jejuni
MARILAFDIGISSIGWAFSENDELKDCGVRIFTKAENPKTGESLALPRRLARSARKRLARRKARLNHLKHLIANEFKLNYEDYQSFDESLAKAYKGSLISPYELRFRALNELLSKQDFARVILHIAKRRGYDDIKNNGDEEKSEILKAIKQNEEKLVNYQSVGEYLYKEYFQKFKENSKEFINVRNKKESYERCITQSFLKDELKLIFQKQREFGFSFSKKFEEEVLSVAFYKRALKDFSHLVGNCSFFTDEKRAPKNSPLAFMFVALTRIINLLNNLKNTEGILYTKDDLNALLNEVLKNGTLTYKQTKKLLGLSDDYEFKGEKGTYFIEFKKYKEFIKALDEHSLSQDDLNEIAKDITLIKDEIKLKKALAKYDLNQNQIDSLSKLEFKDHLNISFKALKLITPLMLEGKKYDEACNELNLKVAINEDKKDFLPAFNETYYKDEVTNPVVLRAIKEYRKILNALLKKYGKVHKINIELAREVGKNHSQRAKIEKEQNENYKAKKDAEIECEKLGLKINSKNILKLRLFKEQKEFCAYSGEKIKISDLQDEKMLEIDHIYPYSRSFDDSYMNKVLVFTKQNQEKLNKTPFEAFGNDGVKWQKIEVLAKNLPEKKQKRILDKNYKDKEQKDFKDRNLNDTRYIARLVLNYTKDYLDFLPLSDDENTKLNDTQKGSKVHVEAKSGMLTSALRHTWGFSTKDRNNHLHHAIDAAIIAYANNSIVKAFSDFKKEQESNSAELYAKKISELDYKNKRKFFEPFSGFRQKVLDKIDEIFVSKPERKKPSGALHEETFRKEEEFYQSYGGKEGVLKALELGKIRKVNGKIVKNGDMFRVDIFKHKKTNKFYAVPIYTMDFALKVLPNKAVARSKKGEIKDWILMDENYEFCFSLYKDSLILIQTKDMQEPELVYFNAFTSSTVSLVVSKHDNKFETLSKNQKILFKNANEKEVIAKSIGIQNLKVFEKYIVSALGEVTKAEFRQREDFKK

SEQ ID NO: 352 - protein, 984 aa, Campylobacter jejuni
MARILAFDIGISSIGWAFSENDELKDCGVRIFTKAENPKTGESLALPRRLARSARKRLARRKARLNHLKHLIANEFKLNYEDYQSFDESLAKAYKGSLISPYELRFRALNELLSKQDFARVILHIAKRRGYDDIKNSDDKEKGAILKAIKQNEEKLANYQSVGEYLYKEYFQKFKENSKEFTNVRNKKESYERCIAQSFLKDELKLIFKKQREFGFSFSKKFEEEVLSVAFYKRALKDFSHLVGNCSFFTDEKRAPKNSPLAFMFVALTRIINLLNNLKNTEGILYTKDDLNALLNEVLKNGTLTYKQTKKLLGLSDDYEFKGEKGTYFIEFKKYKEFIKALGDHSLSQDDLNEIAKDITLIKDEIKLKKALAKYDLNQNQIDSLSKLEFKDHLNISFKALKLITPLMLEGKKYDEACNELNLKVAINEDKKDFLPAFNETYYKDEVTNPVVLRAIKEYRKVLNALLKKYGKVHKINIELAREVGKNYSQRAKIEKEQNENYKAKKDAELECEKLGLKINSKNILKLRLFKEQKEFCAYSGEKIKISDLQDEKMLEIDHIYPYSRSFDDSYMNKVLVFTKQNQEKLNQTPFEAFGNDSAKWQKIEVLAKNLPTKKQKRILDKNYKDKEQKDFKDRNLNDTRYIARLVLNYTKDYLDFLPLSDDENTKLNDTQKGSKVHVEAKSGMLTSALRHTWGFSAKDRNNHLHHAIDAVIIAYANNSIVKAFSDFKKEQESNSAELYAKKISELDYKNKRKFFEPFSGFRQKVLDKIDEIFVSKPERKKPSGALHEETFRKEEEFYQSYGGKEGVLKALELGKIRKVNGKIVKNGDMFRVDIFKHKKTNKFYAVPIYTMDFALKVLPNKAVARSKKGEIKDWILMDENYEFCFSLYKDSLILIQTKDMQEPEFVYYNAFTSSTVSLIVSKHDNKFETLSKNQKILFKNANEKEVIAKSIGIQNLKVFEKYIVSALGEVTKAEFRQREDFKK

SEQ ID NO: 353 - protein, 984 aa, Campylobacter jejuni
MARILAFDIGISSIGWAFSENDELKDCGVRIFTKAENPKTGESLALPRRLARSARKRLARRKARLNHLKHLIANEFKLNYEDYQSFDESLAKAYKGSLISPYELRFRALNELLSKQDFARVILHIAKRRGYDDIKNSDDKEKGAILKAIKQNEEKLANYQSVGEYLYKEYFQKFKENSKEFTNVRNKKESYERCIAQSFLKDELKLIFKKQREFGFSFSKKFEEEVLSVAFYKRALKDFSHLVGNCSFFTDEKRAPKNSPLAFMFVALTRIINLLNNLKNTEGILYTKDDLNTLLNEVLKNGTLTYKQTKKLLGLSDDYEFKGEKGTYFIEFKKYKEFIKALGEHNLSQDDLNEIAKDITLIKDEIKLKKALAKYDLNQNQIDSLSKLEFKDHLNISFKALKLITPLMLEGKKYDEACNELNLKVAINEDKKDFLPAFNETYYKDEVTNPVVLRAIKEYRKVLNALLKKYGKVHKINIELAREVGKNYSQRAKIEKEQNENYKAKKDAELECEKLGLKINSKNILKLRLFKEQKEFCAYSGEKIKISDLQDEKMLEIDHIYPYSRSFDDSYMNKVLVFTKQNQEKLNKTPFEAFGNDSTKWQKIEVLAKNLPEKKQKRILDKNYKDKEQKDFKDRNLNDTRYIARLVLNYTKDYLDFLPLSDDENTKLNDTQKGLKVHVEAKSGMLTSALRHTWGFSAKDRNNHLHHAIDAVIIAYANNSIVKAFSDFKKEQESNSAELYAKKISELDYKNKRKFFEPFSGFRQKVLDKIDEIFVSKPERKKPSGALHEETFRKEEEFYQSYGGKEGVLKALELGKIRKVNGKIVKNGDMFRVDIFKHKKTNKFYAVPIYTMDFALKVLPNKAVARSKKGEIKDWILMDENYEFCFSLYKDSLILIQTKDMQEPEFVYYNAFTSSTVSLIVSKHDNKFETLSKNQKILFKNANEKEVIAKSIGIQNLKVFEKYIVSALGEVTKAEFRQREDFKK

SEQ ID NO: 354 - protein, 984 aa, Campylobacter jejuni
MARILAFDIGISSIGWAFSENDELKDCGVRIFTKAENPKTGESLALPRRLARSARKRLARRKARLNHLKHLIANEFKLNYEDYQSFDESLAKAYKGSLISPYELRFRALNELLSKQDFARVILHIAKRRGYDDIKNSDDKEKGAILKAIKQNEEKLANYQSVGEYLYKEYFQKFKENSKEFTNVRNKKESYERCIAQSFLKDELKLIFKKQREFGFSFSKKFEEEVLSVAFYKRALKDFSHLVGNCSFFTDEKRAPKNSPLAFMFVALTRIINLLNNLKNTEGILYTKDDLNALLNEVLKNGTLTYKQTKKLLGLSDDYEFKGEKGTYFIEFKKYKEFIKALGDHSLSQDDLNEIAKDITLIKDEIKLKKALAKYDLNQNQIDSLSKLEFKDHLNISFKALKLITPLMLEGKKYDEACNELNLKVAINEDKKDFLPAFNETYYKDEVTNPVVLRAIKEYRKVLNALLKKYGKVHKINIELAREVGKNYSQRAKIEKEQNENYKAKKDAELECEKLGLKINSKNILKLRLFKEQKEFCAYSGEKIKISDLQDEKMLEIDHIYPYSRSFDDSYMNKVLVFTKQNQEKLNQTPFEAFGNDSAKWQKIEVLAKNLPTKKQKRILDKNYKDKEQKNFKDRNLNDTRYIARLVLNYTKDYLDFLPLSDDENTKLNDTQKGSKVHVEAKSGMLTSALRHTWGFSAKDRNNHLHHTIDAVIIAYANNSIVKAFSDFKKEQESNSAELYAKKISELDYKNKRKFFEPFSGFRQKVLDKIDEIFVSKPERKKPSGALHEETFRKEEEFYQSYGGKEGVLKALELGKIRKVNGKIVKNGDMFRVDIFKHKKTNKFYAVPIYTMDFALKVLPNKAVARSKKGEIKDWILMDENYEFCFSLYKDSLILIQTKDMQEPEFVYYNAFTSSTVSLIVSKHDNKFETLSKNQKILFKNANEKEVIAKSIGIQNLKVFEKYIVSALGEVTKAEFRQREDFKK

SEQ ID NO: 355 - protein, 984 aa, Campylobacter jejuni
MARILAFDIGISSIGWAFSENDELKDCGVRIFTKAENPKTGESLALPRRLARSARKRLARRKARLNHLKHLIANEFKLNYEDYQSFDESLAKAYKGSLISPYELRFRALNELLSKQDFARVILHIAKRRGYDDIKNSDDKEKGAILKAIKQNEEKLANYQSVGEYLYKEYFQKFKENSKEFTNVRNKKESYERCIAQSFLKDELKLIFKKQREFGFSFSKKFEEEVLSVAFYKRALKDFSHLVGNCSFFTDEKRAPKNSPLAFMFVALTRIINLLNNLKNTEGILYTKDDLNTFLNEVLKNGTLTYKQTKKLLGLSDDYEFKGEKGTYFIEFKKYKEFIKALGDHNLSQDDLNEIAKDITLIKDEIKLKKALAKYDLNQNQIDSLSKLEFKDHLNISFKALKLITPLMLEGKKYDEACNELNLKVAINEDKKDFLPAFNETYYKDEVTNPVVLRAIKEYRKVLNALLKKYGKVHKINIELAREVGKNHSQRAKIEKEQNENYKAKKDAELECEKLGLKINSKNILKLRLFKEQKEFCAYSGEKIKISDLQDEKMLEIDHIYPYSRSFDDSYMNKVLVFTKQNQEKLNKTPFEAFGNDSAKWQKIEVLAKNLPTKKQKRILDKNYKDKEQKDFKDRNLNDTRYIARLVLNYTKDYLDFLPLSDDENTKLNDTQKGSKVHVEAKSGMLTSALRHTWGFSTKDRNNHLHHAIDAVIIAYANNSIVKAFSDFKKEQESNSAELYAKKISELDYKNKRKFFEPFSGFRQKVLDKIDEIFVSKPERKKPSGALHEETFRKEEEFYQSYGGKEGVLKALELGKIRKVNGKIVKNGDMFRVDIFKHKKTNKFYAVPIYTMDFALKVLPNKAVARSKKGEIKDWILMDENYEFCFSLYKDSLILIQTKDMQEPEFVYYNAFTSSTVSLIVSKHDNKFETLSKNQKILFKNANEKEVIAKSIGIQNLKVFEKYIVSALGEVTKAEFRQREDFKK

SEQ ID NO: 356 - protein, 987 aa, Campylobacter jejuni
MARILAFDIGISSIGWAFSENDELKDCGVRIFTKAENPKTGESLALPRRLARSARKRLARRKARLNHLKHLIANEFKLNYEDYQSFDESLAKAYKGSLISPYELRFRALNELLSKQDFARVILHIAKRRGYDDIKNSDDKEKGAILKAIKQNEEKLANYQSVGEYLYKEYFQKFKENSKEFTNVRNKKESYERCIAQSFLKDELKLIFKKQREFGFSFSKKFEEEVLSVAFYKRALKDFSHLVGNCSFFTDEKRAPKNSPLAFMFVALTRIINLLNNLKNTEGILYTKDDLNTLLNEVLKNGTLTYKQTKKLLGLSDDYEFKGEKGTYFIEFKKYKEFIKSLGDHSLSQDDLNEIAKDITLIKDEIKLKKALAKYDLNQNQIDSLSKLEFKDHLNISFKALKLITPLMLEGKKYDEACNELNLKVAINEDKKDFLPAFNETYYKDEVTNPVVLRAIKEYRKVLNALLKKYGKVHKINIELAREVGKNHSQRAKIEKEQNENYKAKKDAELECEKLGLKINSKNILKLRLFKEQKEFCAYSGEKIKISDLQDEKMLEIDHIYPYSRSFDDSYMNKVLVFTKQNQEKLNQTPFEAFGNDSAKWQKIEVLAKNLPTKKQKRILDKNYKDKEQKNFKDRNLNDTRYIARLVLNYTKDYLDFLPLSDDENTKLNDTQKGSKVHVEAKSGMLTSALRHTWGFSAKDRNNHLHHAIDAVIIAYANNSIVKAFSDFKKEQESNSAELYAKKISELDYKNKRKFFEPFSGFRQKVLDKIDEIFVSKPERKKPSGALHEETFRKEEEFYQSYGGKEGVLKALELGKIRKVNGKIVKNGDMFRVDIFKHKKTNKFYAVPIYTMDFALKVLPNKAVARSKKGEIKDWILMDENYEFCFSLYKDSLILIQTKDMQEPEFVYYNAFTSSTVSLIVSKHDNKFETLSKNQKILFKNANEKEVIAKSIGIQNLKVFEKYIVSALGEVTKAEFRQREDFKNELR

SEQ ID NO: 357 - protein, 987 aa, Campylobacter jejuni
MARILAFDIGISSIGWAFSENDELKDCGVRIFTKAENPKTGESLALPRRLARSARKRLARRKARLNHLKHLIANEFKLNYEDYQSFDESLAKAYKGSLISPYELRFRALNELLSKQDFARVILHIAKRRGYDDIKNSDDKEKGAILKAIKQNEEKLANYQSVGEYLYKEYFQKFKENSKEFTNVRNKKESYERCIAQSFLKDELKLIFKKQREFGFSFSKKFEEEVLSVAFYKRALKDFSHLVGNCSFFTDEKRAPKNSPLAFMFVALTRIINLLNNLKNTEGILYTKDDLNALLNEVLKNGTLTYKQTKKLLGLSDDYEFKGEKGTYFIEFKKYKEFIKALGDHSLSQDDLNEIAKDITLIKDEIKLKKALVKYDLNQNQIDSLSKLEFKDHLNISFKALKLITPLMLEGKKYDEACNELNLKVAINEDKKDFLPAFNETYYKDEVTNPVVLRAIKEYRKVLNALLKKYGKVHKINIELAREVGKNYSQRAKIEKEQNENYKAKKDAELECEKLGLKINSKNILKLRLFKEQKEFCAYSGEKIKISDLQDEKMLEIDHIYPYSRSFDDSYMNKVLVFTKQNQEKLNQTPFEAFGNDSAKWQKIEVLAKNLPTKKQKRILDKNYKDKEQKDFKDRNLNDTRYIARLVLNYTKDYLDFLPLSDDENTKLNDTQKGSKVHVEAKSGMLTSALRHTWGFSAKDRNNHLHHAIDAVIIAYANNSIVKAFSDFKKEQESNSAELYAKKISELDYKNKRKFFEPFSGFRQKVLDKIDEIFVSKPERKKPSGALHEETFRKEEEFYQSYGGKEGVLKALELGKIRKVNGKIVKNGDMFRVDIFKHKKTNKFYAVPIYTMDFALKVLPNKAVARSKKGEIKDWILMDENYEFCFSLYKDSLILIQTKDMQEPELVYFNAFTSSTVSLIVSKHDNKFETLSKNQKILFKNANEKEVIAKSIGIQNLKVFEKYIVSALGEVTKAEFRQREDFKNELR

SEQ ID NO: 358 - protein, 983 aa, Campylobacter jejuni; identical to SEQ ID NO: 236

SEQ ID NO: 359 - protein, 987 aa, Campylobacter jejuni
MARILAFDIGISSIGWAFSENDELKDCGVRIFTKAENPKTGESLALPRRLARSARKRLARRKARLNHLKHLIANEFKLNYEDYQSFDESLAKAYKGSLISPYELRFRALNELLSKQDFARVILHIAKRRGYDDIKNSDDKEKGAILKAIKQNEEKLVNYQSVGEYLYKEYFQKFKENSKEFTNVRNKKESYERCIAQSFLKDELKLIFKKQREFGFSFSKKFEEEVLSVAFYKRALKDFSHLVGNCSFFTDEKRAPKNSPLAFMFVALTRIINLLNNLKNTEGILYTKDDLNALLNEVLKNGTLTYKQTKKLLGLSDDYEFKGEKGTYFIEFKKYKEFIKALGDHSLSQDDLNEIAKDITLIKDEIKLKKALAKYDLNQNQIDSLSKLEFKDHLNISFKALKLITPLMLEGKKYDEACNELNLKVAINEDKKDFLPAFNETYYKDEVTNPVVLRAIKEYRKVLNALLKKYGKVHKINIELAREVGKNYSQRAKIEKEQNENYKAKKDAELECEKLGLKINSKNILKLRLFKEQKEFCAYSGEKIKISDLQDEKMLEIDHIYPYSRSFDDSYMNKVLVFTKQNQEKLNQTPFEAFGNDSAKWQKIEVLAKNLPTKKQKRILDKNYKDKEQKDFKDRNLNDTRYIARLVLNYTKDYLDFLPLSDDENTKLNDTQKGSKVHVEAKSGMLTSALRHTWGFSAKDRNNHLHHAIDAVIIAYANNSIVKAFSDFKKEQESNSAELYAKKISELDYKNKRKFFEPFSGFRQKVLDKIDEIFVSKPERKKPSGALHEETFRKEEEFYQSYGGKEGVLKALELGKIRKVNGKIVKNGDMFRVDIFKHKKTNKFYAVPIYTMDFALKVLPNKAVARSEKGEIKDWILMDENYEFCFSLYKDSLILIQTKDMQEPELVYFNAFTSSTVSLIVSKHDNKFETLSKNQKILFKNANEKEVIAKSIGIQNLKVFEKYIVSALGEVTKAEFRQREDFKNELR

SEQ ID NO: 360 - protein, 987 aa, Campylobacter jejuni
MARILAFDIGISSIGWAFSENDELKDCGVRIFTKAENPKTGESLALPRRLARSARKRLARRKARLNHLKHLIANEFKLNYEDYQSFDESLAKAYKGSLISPYELRFRALNELLSKQDFARVILHIAKRRGYDNIKNSDNEEKSEILKAIKQNEEKLVNYQSVGEYLYKEYFQKFKENSKEFINVRNKKESYERCIAQSFLKDELKLIFQKQREFGLSFSKKFEEEVLSVAFYKRALKDFSHLVGNCSFFTDEKRAPKNSPLAFMFVALTRIINLLNNLKNTEGILYTKDDLNTLLNEVLKNGTLTYKQTKKLLGLSDDYEFKGEKGTYFIEFKKYKEFIKALGDHSLSQDDLNEIAKDITLIKDEIKLKKALAKYDLNQNQIDSLSKLEFKDHLNISFKALKLITPLMLEGKKYDEACNELNLKVVINEDKKDFLPAFNETYYKDEVTNPVVLRAIKEYRKVLNALLKKYGKVHKINIELAREVGKNHSQRAKIEKEQNENYKAKKDAELECEKLGLKINNKNILKLRLFKEQKEFCAYSGEKIKLSDLQDEKMLEIDHIYPYSRSFDDSYMNKVLVFTKQNQEKLNKTPFEAFGNDSTKWQKIEVLAKNLPTKKQKRILDKNYKDKEQKDFKDRNLNDTRYIARLVLNYTKDYLDFLPLSDDENTKLNDIQKGSKVHVEAKSGMLTSALRHTWGFSTKDRNNHLHHAIDAVIIAYANNSIVKAFSDFKKEQESNSAELYAKKISELDYKNKRKFFEPFSGFRQKVLDKIDEIFVSKPERKKPSGALHEETFRKEEEFYQSYGGKEGVLKALELGKIRKVNGKIVKNGDMFRVDIFKHKKTNKFYAVPIYTMDFALKVLPNKAVVQGKDKKSGLIKDWILMDENYEFCFSLYKDSLILIQTKDMQEPEFVYYNAFTSSTVSLIVSKHDNKFETLSKNQKILFKNANEKEVIAKSIGIQNLKVFEKYIVSALGEVTKAEFRQREDFKK

SEQ ID NO: 361 - protein, 984 aa, Campylobacter jejuni
MARILAFDIGISSIGWAFSENDELKDCGVRIFTKAENPKTGESLALPRRLARSARKRLARRKARLNHLKHLIANEFKLNYEDYQSFDESLAKAYKGSLISPYELRFRALNELLSKQDFARVILHIVKRRGYDDIKNSDDKEKGAILKAIKQNEEKLANYQSVGEYLYKEYFQKFKENSKEFTNVRNKKESYERCIAQSFLKDELKLIFKKQREFGFSFSKKFEEEVLSVAFYKRALKDFSHLVGNCSFFTDEKRAPKNSPLAFMFVALTRIINLLNNLKNTEGILYTKDDLNTLLNEVLKNGTLTYKQTKKLLGLSDDYEFKGEKGTYFIEFKKYKEFIKALGDHSLSQDDLNEIAKDITLIKDEIKLKKALAKYDLNQNQIDSLSKLEFKDHLNISFKALKLITPLMLEGKKYDEACNELNLKVAINEDKKDFLPAFNETYYKDEVTNPVVLRAIKEYRKVLNALLKKYGKVHKINIELAREVGKNHSQRAKIEKEQNENYKAKKDAEFECEKLGLKINSKNILKLRLFKEQKEFCAYSGEKIKISDLQDEKMLEIDHIYPYSRSFDDSYMNKVLVFTKQNQEKLNKTPFEAFGNDSAKWQKIEVLAKNLPTKKQKRILDKNYKDKEQKDFKDRNLNDTRYIARLVLNYTKDYLDFLPLSDDENTKLNDTQKGSKVHVEAKSGMLTSALRHTWGFSTKDRNNHLHHAIDAVIIAYANNSIVKAFSDFKKEQESNSAELYAKKISELDYKNKRKFFEPFSGFRQKVLDKIDEIFVSKPERKKPSGALHEETFRKEEEFYQSYGGKEGVLKALELGKIRKVNGKIVKNGDMFRVDIFKHKKTNKFYAVPIYTMDFALKVLPNKAVARSKKGEIKDWILMDENYEFCFSLYKDSLILIQTKDMQEPEFVYYNAFTSSTVSLIVSKHDNKFETLSKNQKILFKNANEKEVIAKSIGIQNLKVFEKYIVSALGEVTKAEFRQREDFKK

SEQ ID NO: 362 - protein, 984 aa, Campylobacter jejuni
MARILAFDIGISSIGWAFSENDELKDCGVRIFTKAENPKTGESLALPRRLARSARKRLARRKARLNHLKHLIANEFKLNYEDYQSFDESLAKAYKGSLISPYELRFRALNELLSKQDFARVILHIVKRRGYDDIKNSDDKEKGTILKAIKQNEEKLANYQSVGEYLYKEYFQKFKENSKEFTNVRNKKESYERCIAQSFLKDELKLIFKKQREFGFSFSKKFEEEVLSVAFYKRALKDFSHLVGNCSFFTDEKRAPKNSPLAFMFVALTRIINLLNNLKNTEGILYTKDDLNTLLNEVLKNGTLTYKQTKKLLGLSDDYEFKGEKGTYFIEFKKYKEFIKALGEHNLSQDDLNEIAKDITLIKDEIKLKKALAKYDLNQNQIDSLSKLEFKDHLNISFKALKLITPLMLEGKKYDEACNELNLKVAINEDKKDFLPAFNETYYKDEVTNPVVLRAIKEYRKVLNALLKKYGKVHKINIELAREVGKNYSQRAKIEKEQNENYKAKKDAELECEKLGLKINSKNILKLRLFKEQKEFCAYSGEKIKISDLQDEKMLEIDHIYPYSRSFDDSYMNKVLVFTKQNQEKLNQTPFEAFGNDSAKWQKIEVLAKNLPTKKQKRILDKNYKDKEQKDFKDRNLNDTRYIARLVLNYTKDYLDFLPLSDDENTKLNDTQKGSKVHVEAKSGMLTSALRHTWGFSAKDRNNHLHHAIDAVIIAYANNSIVKAFSDFKKEQESNSAELYAKKISELDYKNKRKFFEPFSGFRQKVLDKIDEIFVSKPERKKPSGALHEETFRKEEEFYQSYGGKEGVLKALELGKIRKVNGKIVKNGDMFRVDIFKHKKTNKFYAVPIYTMDFALKVLPNKAVARSKKGEIKDWILMDENYEFCFSLYKDSLILIQTKDMQEPEFVYYNAFTSSTVSLIVSKHDNKFETLSKNQKILFKNANEKEVIAKSIGIQNLKVFEKYIVSALGEVTKAEFRQREDFKK

SEQ ID NO: 363 - protein, 987 aa, Campylobacter jejuni
MARILAFDIGISSIGWAFSENDELKDCGVRIFTKAENPKTGESLALPRRLARSARKRLARRKARLNHLKHLIANEFKLNYEDYQSFNESLAKAYKGSLISPYELRFRALNELLSKQDFARVILHIAKRRGYDDIKNSDDKEKGAILKVIKQNEEKLANYQSVGEYLYKEYFQKFKENSKEFTNVRNKKESYERCIAQSFLKDELKLIFQKQREFGFSFSKKFEEEVLSVAFYKRALKDFSHLVGNCSFFTDEKRAPKNSPLAFMFVALTRIINLLNNLKNTEGILYTKDDLNALLNEVLKNGTLTYKQTKKLLGLSDDYEFKGEKGTYFIEFKKYKEFIKALGDHSLSQDDLNEIAKDITLIKDEIKLKKALAKYDLNQNQIDSLSKLEFKDHLNISFKALKLITPLMLEGKKYDEACNELNLKVAINEDKKDFLPAFNETYYKDEVTNPVVLRAIKEYRKVLNALLKKYGKVHKINIELAREVGKNYSQRAKIEKEQNENYKAKKDAELECEKLGLKINSKNILKLRLFKEQKEFCAYSGEKIKISDLQDEKMLEIDHIYPYSRSFDDSYMNKVLVFTKQNQEKLNQTPFEAFGNDSAKWQKIEVLAKNLPTKKQKRILDKNYKDKEQKDFKDRNLNDTRYIARLVLNYTKDYLDFLPLSDDENTKLNDTQKGSKVHVEAKSGMLTSALRHTWGFSAKDRNNHLHHAIDAVIIAYANNSIVKAFSDFKKEQESNSAELYAKKISELDYKNKRKFFEPFSGFRQKVLDKIDEIFVSKPERKKPSGALHEETFRKEEEFYQSYGGKEGVLKALELGKIRKVNGKIVKNGDMFRVDIFKHKKTNKFYAVPIYTMDFALKVLPNKAVARSKKGEIKDWILMDENYEFCFSLYKDSLILIQTKDMQEPELVYFNAFTSSTVSLIVSKHDNKFETLSKNQKILFKNANEKEVIAKSIGIQNLKVFEKYIVSALGEVTKAEFRQREDFKNELR

SEQ ID NO: 364 - protein, 984 aa, Campylobacter jejuni
MARILAFDIGISSIGWAFSENDELKDCGVRIFTKAENPKTGESLALPRRLARSARKRLARRKARLNRLKHLIANEFKLNYEDYQSFDESLAKAYKGSLISPYELRFRALNELLSKQDFARVILHIAKRRGYDDIKNSDDKEKGAILKAIKQNEEKLANYQSVGEYLYKEYFQKFKENSKEFTNVRNKKESYERCIAQSFLKDELKLIFKKQREFGFSFSKKFEEEVLSVAFYKRALKDFSHLVGNCSFFTDEKRAPKNSPLAFMFVALTRIINLLNNLKNTEGILYTKDDLNALLNEVLKNGTLTYKQTKKLLGLSDDYEFKGEKGTYFIEFKKYKEFIKALGDHSLNQDDLNEIAKDITLIKDEIKLKKALAKYDLNQNQIDSLSKLEFKDHLNISFKALKLITPLMLEGKKYDEACNELNLKVAINEDKKDFLPAFNETYYKDEVTNPVVLRAIKEYRKVLNALLKKYGKVHKINIELAREVGKNYSQRAKIEKEQNENYKAKKDAELECEKLGLKINSKNILKLRLFKEQKEFCVYSGEKIKISDLQDEKMLEIDHIYPYSRSFDDSYMNKVLVFTKQNQEKLNQTPFEAFGNDSAKWQKIEVLAKNLPTKKQKRILDKNYKDKEQKDFKDRNLNDTRYIARLVLNYTKDYLDFLPLSDDENTKLNDTQKGSKVYVEAKSGMLTSALRHTWGFSTKDRNNHLHHAIDAVIIAYANNSIVKAFSDFKKEQESNSAELYAKKISELDYKNKRKFFEPFSGFRQKVLDKIDEIFVSKPERKKPSGALHEETFRKEEEFYQSYGGKEGVLKALELGKIRKVNGKIVKNGDMFRVDIFKHKKTNKFYAVPIYTMDFALKVLPNKAVARSKKGEIKDWILMDENYEFCFSLYKDSLILIQTKDMQEPEFVYYNAFTSSTVSLIVSKHDNKFETLSKNQKILFKNANEKEVIAKSIGIQNLKVFEKYIVSALGEVTKAEFRQREDFKK

SEQ ID NO: 365 - protein, 984 aa, Campylobacter jejuni
MARILAFDIGISSIGWAFSENDELKDCGVRIFTKVENPKTGESLALPRRLARSARKRLARRKARLNHLKHLIANEFKLNYEDYQSFDESLAKAYKGSLISPYELRFRALNELLSKQDFARVILHIAKRRGYDDIKNSDDKEKGAILKAIKQNEEKLANYQSVGEYLYKEYFQKFKENSKEFTNVRNKKESYERCIAQSFLKDELKLIFKKQREFGFSFLKKFEEEVLSVAFYKRALKDFSHLVGNCSFFTDEKRAPKNSPLAFMFVALTRIINLLNNLKNTEGILYTKDDLNALLNEVLKNGTLTYKQTKKLLGLSDDYEFKGEKGTYFIEFKKYKEFIKALGEHNLSQDDLNEIAKDITLIKDEIKLKKALAKYDLNQNQIDSLSKLEFKDHLNISFKALKLITPLMLEGKKYDEAYNELNLKVAINEDKKDFLPAFNETYYKDEVTNPVVLRAIKEYRKVLNALLKKYGKVHKINIELAREVGKNHSQRAKIEKEQNENYKAKKDAELECEKLGLKINSKNILKLRLFKEQKEFCAYSGEKIKISDLQDEKMLEIDHIYPYSRSFDDSYMNKVLVFTKQNQEKLNQTPFEAFGNDSAKWQKIEVLAKNLPTKKQKRILDKNYKDKEQKDFKDRNLNDTRYIARLVLNYTKDYLDFLPLSDDENTKLNDTQKGSKVHVEAKSGMLTSALRHTWGFSAKDRNNHLHHAIDAVIIAYANNSIVKAFSDFKKEQESNSAELYAKKISELDYKNKRKFFEPFSGFRQKVLDKIDEIFVSKPERKKPSGALHEETFRKEEEFYQSYGGKEGVLKALELGKIRKVNGKIVKNGDMFRVDIFKHKKTNKFYAVPIYTMDFALKVLPNKAVARSKKGEIKDWILMDENYEFCFSLYKDSLILIQTKDMQEPELVYFNAFTSSTVSLIVSKHDNKFETLSKNQKILFKNANEKEVIAKSIGIQNLKVFEKYIVSALGEVTKAEFRQREDFKK

SEQ ID NO: 366 - protein, 984 aa, Campylobacter jejuni
MARILAFDIGISSIGWAFSENDELKDCGVRIFTKVENPKTGESLALPRRLARSARKRLARRKARLNHLKHLIANEFKLNYEDYQSFDESLAKAYKGSLISPYELRFRALNELLSKQDFARVILHIAKRRGYDDIKNSDDKEKGAILKAIKQNEEKLANYQSVGEYLYKEYFQKFKENSKEFTNVRNKKESYERCIAQSFLKDELKLIFKKQREFGFSFSKKFEEEVLSVAFYKRALKDFSHLVGNCSFFTDEKRAPKNSPLAFMFVALTRIINLLNNLKNTEGILYTKDDLNALLNEVLKNGTLTYKQTKKLLGLSDDYEFKGEKGTYFIEFKKYKEFIKALGEHNLSQDDLNEIAKDITLIKDEIKLKKALAKYDLNQNQIDSLSKLEFKDHLNISFKALKLITPLMLEGKKYDEACNELNLKVAINEDKKDFLPAFNETYYKDEVTNPVVLRAIKEYRKVLNALLKKYGKVHKINIELAREVGKNHSQRAKIEKEQNENYKAKKDAELECEKLGLKINSKNILKLRLFKEQKEFCAYSGEKIKISDLQDEKMLEIDHIYPYSRSFDDSYMNKVLVFTKQNQEKLNKTPFEAFGNDSAKWQKIEVLAKNLPTKKQKRILDKNYKDKEQKDFKDRNLNDTRYIARLVLNYTKDYLDFLPLSNDENTKLNDTQKGSKVHVEAKSGMLTSALRHTWGFSTKDRNNHLHHAIDAVIIAYANNSIVKAFSDFKKEQESNSAELYAKKISELDYKNKRKFFEPFSGFRQKVLDKIDEIFVSKPERKKPSGALHEETFRKEEEFYQSYGGKEGVLKALELGKIRKVNGKIVKNGDMFRVDIFKHKKTNKFYAVPIYTMDFALKVLPNKAVARSKKGEIKDWILMDENYEFCFSLYKDSLILIQTKDMQEPEFVYYNAFTSSTVSLIVSKHDNKFETLSKNQKILFKNANEKEVIAKSIGIQNLKVFEKYIVSALGEVTKAEFRQREDFKK

SEQ ID NO: 367 - protein, 984 aa, Campylobacter jejuni
MARILAFDIGISSIGWAFSENDELKDCGVRIFTKVENPKTGESLALPRRLARSARKRLARRKARLNHLKHLIANEFKLNYEDYQSFDESLAKAYKGSLISPYELRFRALNELLSKQDFARVILHIAKRRGYDDIKNSDDKEKGAILKAIKQNEEKLANYQSVGEYLYKEYFQKFKENSKEFTNVRNKKESYERCIAQSFLKDELKLIFKKQREFGFSFSKKFEEEVLSVAFYKRALKDFSHLVGNCSFFTDEKRAPKNSPLAFMFVALTRIINLLNNLKNTEGILYTKDDLNALLNEVLKNGTLTYKQTKKLLGLSDDYEFKGEKGTYFIEFKKYKEFIKALGEHNLSQDDLNEIAKDITLIKDEIKLKKALAKYDLNQNQIDSLSKLEFKDHLNISFKALKLITPLMLEGKKYDEACNELNLKVAINEDKKDFLPAFNETYYKDEVTNPVVLRAIKEYRKVLNALLKKYGKVHKINIELAREVGKNHSQRAKIEKEQNENYKAKKDAELECEKLGLKINSKNILKLRLFKEQKEFCAYSGEKIKISDLQDEKMLEIDHIYPYSRSFDDSYMNKVLVFTKQNQEKLNKTPFEAFGNDSAKWQKIEVLAKNLPTKKQKRILDKNYKDKEQKDFKDRNLNDTRYIARLVLNYTKDYLDFLPLSDDENTKLNDTQKGSKVHVEAKSGMLTSALRHTWGFSTKDRNNHLHHAIDAVIIAYANNSIVKAFSDFKKEQESNSAELYAKKISELDYKNKRKFFEPFSGFRQKVLDKIDEIFVSKPERKKPSGALHEETFRKEEEFYQSYGGKEGVLKALELGKIRKVNGKIVKNGDMFRVDIFKHKKTNKFYAVPIYTMDFALKVLPNKAVARSKKGEIKDWILMDENYEFCFSLYKDSLILIQTKDMQEPEFVYYNAFTSSTVSLIVSKHDNKFETLSKNQKILFKNANEKEVIAKSIGIQNLKVFEKYIVSALGEVTKAEFRQREDFKK

SEQ ID NO: 368 - protein, 984 aa, Campylobacter jejuni
MARILAFDIGISSIGWAFSENDELKDCGVRIFTKVENPKTGESLALPRRLARSARKRLARRKARLNHLKHLIANEFKLNYEDYQSFDESLAKAYKGSLISPYELRFRALNELLSKQDFARVILHIAKRRGYDDIKNSDDKEKGAILKAIKQNEEKLANYQSVGEYLYKEYFQKFKENSKEFTNVRNKKESYERCIAQSFLKDELKLIFKKQREFGFSFSKKFEEEVLSVAFYKRALKDFSHLVGNCSFFTDEKRAPKNSPLAFMFVTLTRIINLLNNLKNTEGILYTKDDLNALLNEVLKNGTLTYKQTKKLLGLSDDYEFKGEKGTYFIEFKKYKEFIKALGEHNLSQDDLNEIAKDITLIKDEIKLKKALAKYDLNQNQIDSLSKLEFKDHLNISFKALKLITPLMLEGKKYDEACNELNLKVAINEDKKDFLPAFNETYYKDEVTNPVVLRAIKEYRKVLNALLKKYGKVHKINIELAREVGKNHSQRAKIEKEQNENYKAKKDAELECEKLGLKINSKNILKLRLFKEQKEFCAYSGEKIKISDLQDEKMLEIDHIYPYSRSFDDSYMNKVLVFTKQNQEKLNKTPFEAFGNDSAKWQKIEVLAKNLPTKKQKRILDKNYKDKEQKDFKDRNLNDTRYIARLVLNYTKDYLDFLPLSDDENTKLNDTQKGSKVHVEAKSGMLTSALRHTWGFSTKDRNNHLHHAIDAVIIAYANNSIVKAFSDFKKEQESNSAELYAKKISELDYKNKRKFFEPFSGFRQKVLDKIDEIFVSKPERKKPSGALHEETFRKEEEFYQSYGGKEGVLKALELGKIRKVNGKIVKNGDMFRVDIFKHKKTNKFYAVPIYTMDFALKVLPNKAVARSKKGEIKDWILMDENYEFCFSLYKDSLILIQTKDMQEPEFVYYNAFTSSTVSLIVSKHDNKFETLSKNQKILFKNANEKEVIAKSIGIQNLKVFEKYIVSALGEVTKAEFRQREDFKK

SEQ ID NO: 369 - protein, 984 aa, Campylobacter jejuni
MARILAFDIGISSIGWAFSENDELKDCGVRIFTKVENPKTGESLALPRRLARSARKRLARRKARLNHLKHLIANEFKLNYEDYQSFDESLAKAYKGSLISPYELRFRALNELLSKQDFARVILHIAKRRGYDDIKNSDDKEKGAILKAIKQNEEKLANYQSVGEYLYKEYFQKFKENSKEFTNVRNKKESYERCIAQSFLKDELKLIFKKQREFGFSFSKKFEEEVLSVAFYKRALKDFSHLVGNCSFFTDEKRAPKNSPLAFMFVALTRIINLLNNLKNTEGILYTKDDLNALLNEVLKNGTLTYKQTKKLLGLSDDYEFKGEKGTYFIEFKKYKEFIKALGEHNLSQDDLNEIAKDITLIKDEIKLKKALAKYDLNQNQIDSLSKLEFKDHLNISFKALKLITPLMLEGKKYDEACNELNLKVAINEDKKDFLPAFNETYYKDEVTNPVVLRAIKEYRKVLNALLKKYGKVHKINIELAREVGKNHSQRAKIEKEQNENYKAKKDAELECEKLGLKINSKNILKLRLFKEQKEFCAYSGEKIKISDLQDEKMLEIDHIYPYSRSFDDSYMNKVLVFTKQNQEKLNKTPFEAFGNDSAKWQKIEVLAKNLPTKKQKRILDKNYKDKEQKDFKDRNLNDTRYIARLVLNYTKDYLDFLPLSDDENTKLNDTQKGSKVHVEAKSGMLTSALRHTWGFSTKDRNNHLHHAIDAVIIAYANNSIVKAFSDFKKEQESNSAELYAKKISELDYKNKRKFFEPFSGFRQKVLDKIDEIFVSKPERKKPSGALHEETFRKEEEFYQSYGGKEGVLKALELGKIRKVNGKIVKNGDMFRVDIFKHKKTNKFYAVPIYTMDFALKVLPNKAVARSKKGEIKDWILMDENYEFCFSLYKDSLILIQTKDMQEPEFVYYNAFTSSTVSLIVSKHDNKFETLSKNQKILFKNANEKEVIAKSIGIQNLKVFEKYIVSALGEVTKAEFIQREDFKK

SEQ ID NO: 370 - protein, 987 aa, Campylobacter jejuni
MARILAFDIGISSIGWAFSENDELKDCGVRIFTKVENPKTGESLALPRRLARSARKRLARRKARLNHLKHLIANEFKLNYEDYQSFDESLAKAYKGSLISPYELRFRALNELLSKQDFARVILHIAKRRGYDDIKNSDDKEKGAILKAIKQNEEKLANYQSVGEYLYKEYFQKFKENSKEFTNVRNKKESYERCIAQSFLKDELKLIFKKQREFGFSFSKKFEEEVLSVAFYKRALKDFSHLVGNCSFFTDEKRVPKNSPLAFMFVALTRIINLLNNLKNTEGILYTKDDLNALLNEVLKNGTLTYKQTKKLLGLSDDYEFKGEKGTYFIEFKKYKEFIKALGEHNLSQDDLNEIAKDITLIKDEIKLKKALAKYDLNQNQIDSLSKLEFKDHLNISFKALKLITPLMLEGKKYDEACNELNLKVAINEDKKDFLPAFNETYYKDEVTNPVVLRAIKEYRKVLNALLKKYGKVHKINIELAREVGKNHSQRAKIEKEQNENYKAKKDAELECEKLGLKINSKNILKLRLFKEQKEFCAYSGEKIKISDLQDEKMLEIDHIYPYSRSFDDSYMNKVLVFTKQNQEKLNQTPFEAFGNDSAKWQKIEVLAKNLPTKKQKRILDKNYKDKEQKNFKDRNLNDTRYIARLVLNYTKDYLDFLPLSDDENTKLNDTQKGSKVHVEAKSGMLTSALRHTWGFSAKDRNNHLHHAIDAVIIAYANNSIVKAFSDFKKEQESNSAELYAKKISELDYKNKRKFFEPFSGFRQKVLDKIDEIFVSKPERKKPSGALHEETFRKEEEFYQSYGGKEGVLKALELGKIRKVNGKIVKNGDMFRVDIFKHKKTNKFYGVPIYTMDFALKVLPNKAVARSKKGEIKDWILMDENYEFCFSLYKDSLILIQTKDMQEPEFVYYNAFTSSTVSLIVSKHDNKFETLSKNQKILFKNANEKEVIAKSIGIQNLKVFEKYIVSALGEVTKAEFRQREDFKNELR

SEQ ID NO: 371 - protein, 984 aa, Campylobacter jejuni
MARILAFDIGISSIGWAFSENDELKDCGVRIFTKVENPKTGESLALPRRLARSARKRLARRKVRLNHLKHLIANEFKLNYEDYQSFDESLAKAYKGSLISPYELRFRALNELLSKQDFARVILHIAKRRGYDDIKNSDDKEKGAILKAIKQNEEKLANYQSVGEYLYKEYFQKFKENSKEFTNVRNKKESYERCIAQSFLKDELKLIFKKQREFGFSFSKKFEEEVLSVAFYKRALKDFSHLVGNCSFFTDEKRAPKNSPLAFMFVALTRIINLLNNLKNTEGILYTKDDLNALLNEVLKNGTLTYKQTKKLLGLSDDYEFKGEKGTYFIEFKKYKEFIKALGEHNLSQDDLNEIAKDITLIKDEIKLKKALAKYDLNQNQIDSLSKLEFKDHLNISFKALKLITPLMLEGKKYDEACNELNLKVAINEDKKDFLPAFNETYYKDEVTNPVVLRAIKEYRKVLNALLKKYGKVHKINIELAREVGKNHSQRAKIEKEQNENYKAKKDAELECEKLGLKINSKNILKLRLFKEQKEFCAYSGEKIKISDLQDEKMLEIDHIYPYSRSFDDSYMNKVLVFTKQNQEKLNKTPFEAFGNDSAKWQKIEVLAKNLPTKKQKRILDKNYKDKEQKDFKDRNLNDTRYIARLVLNYTKDYLDFLPLSDDENTKLNDTQKGSKVHVEAKSGMLTSALRHTWGFSTKDRNNHLHHAIDAVIIAYANNSIVKAFSDFKKEQESNSAELYAKKISELDYKNKRKFFEPFSGFRQKVLDKIDEIFVSKPERKKPSGALHEETFRKEEEFYQSYGGKEGVLKALELGKIRKVNGKIVKNGDMFRVDIFKHKKTNKFYAVPIYTMDFALKVLPNKAVARSKKGEIKDWILMDENYEFCFSLYKDSLILIQTKDMQEPEFVYYNAFTSSTVSLIVSKHDNKFETLSKNQKILFKNANEKEVIAKSIGIQNLKVFEKYIVSALGEVTKAEFRQREDFKK

SEQ ID NO: 372 - protein, 721 aa, Campylobacter jejuni
MFVALTRIINLLNNLKNTEGILYTKDDLNTLLNEVLKNGTLTYKQTKKLLGLSDDYEFKGEKGTYFIEFKKYKEFIKALGDHSLSQDDLNEIAKDITLIKDEIKLKKALAKYDLNQNQIDSLSKLEFKDHLNISFKALKLITPLMLEGKKYDEACNELNLKVAINEDKKDFLPAFNETYYKDEVTNPVVLRAIKEYRKVLNALLKKYGKVHKINIELAREVGKNYSQRAKIEKEQNENYKAKKDAELECEKLGLKINSKNILKLRLFKEQKEFCAYSGEKIKISDLQDEKMLEIDHIYPYSRSFDDSYMNKVLVFTKQNQEKLNQTPFEAFGNDSAKWQKIEVLAKNLPTKKQKRILDKNYKDKEQKDFKDRNLNDTRYIARLVLNYTKDYLDFLPLSDDENTKLNNTQKGSKVYVEAKSGMLTSALRHTWGFSTKDRNNHLHHAIDAVIIAYANNSIVKAFSDFKKEQESNSAELYAKKISELDYKNKRKFFEPFSGFRQKVLDKIDEIFVSKPERKKPSGALHEETFRKEEEFYQSYGGKEGVLKALELGKIRKVNGKIVKNGDMFRVDIFKHKKTNKFYAVPIYTMDFALKVLPNKAVARSKKGEIKDWILMDENYEFCFSLYKDSLILIQTKDMQEPEFVYYNAFTSSTVSLIVSKHDNKFETLSKNQKILFKNANEKEVIAKSIGIQNLKVFEKYIVSALGEVTKAEFRQREDFKK

SEQ ID NO: 373 - protein, 512 aa, Campylobacter jejuni
MHKINIELAREVGKNHSQRAKIEKEQNENYKAKKDAEIECEKLGLKINSKNILKLRLFKEQKEFCAYSGEKIKLSDLQDEKMLEIDHIYPYSRSFDDSYMNKVLVFTKQNQEKLNKTPFEAFGNDSTKWQKIEVLAKNLPEKKQKRILDKNYKDKEQKDFKDRNLNDTRYIARLVLNYTKDYLDFLPLSDDENTKLNDTQKGSKVHVEAKSGMLTSALRHTWGFSAKDRNNHLHHAIDAAIIAYANNSIVKAFSDFKKEQESNSVELYAKKISELDYKNKRKFFEPFSGFRQKVLDKIDEIFVSKPERKKPSGALHEETFRKEEEFYQSYGGKEGVLKALELGKIRKVNGKIVKNGDMFRVDIFKHKKTNKFYAVPIYTMDFALKVLPNKAVARSKKGEIKDWILMDENYEFCFSLYKDSLILIQTKDMQEPELVYFNAFTSSTVSLIVSKHDNKFETLSKNQKILFKNANEKEVIAKSIGIQNLKVFEKYIVSALGEVTKAEFRQREDFKK

SEQ ID NO: 374 - protein, 965 aa, Campylobacter jejuni
MKIIGFNLGIANIGWALRENDEIIDCGVRVFDIPENPKNGNSLALERRENKARMKIVKRKKARMLATKTFLKKELNVDLSKLFLIGSTQSIYELRAKALSSLISKEELSAIILHIAKHRGYDDSALKNENGTIIEALNKNKETMLKFKSVGEYFYKNFVQNKEVKKIRNTTEDYSNSVPRSLLKQELDLILDKQKELGLIKNADFKEKLFEIIFFKRPLKDFSNKIGNCIFFENEKRAAKNTISACEFVALGKVVNLLKSIEKDIGIVYEKDSINEIMSIILDKTSISYKKIRDILNLPQEINFKGLDYSKNNVENSKLVDLKKLNEFKKALGDGFANLDKDILDSIATDITLTKDTATLKEKLKNYNVLNAEQIEKLSELVFNDHINLSLKALKQIIPLMYEGKRYDEACELCNFTIAKNQEKSEYLPLFEKTRFAKDISSPVVIRAICEFRKLLNDIIRRYGSVHKIHLELTRDFGISFSDRKKIIKEIEQNEQSRIKALETIKELKLEETSKNIQIVRLFEDQKGICPYSGLKMDLNRLDELVIDYIRPYNRSLDDSYSNKVLTFKKLSDLKQGKTPFEAFGEDEKLWAEINERIKEYNGKKRFKIFDKFFKDKKPFDFTEQTLQDTRWLTKLVASYLNEYLSFLPISEDENTALGYGEKGSKQHVILSSGMITQMLRNFWYLGFKNHKDYKNNAMDAIIVAFTTNSIIFAFNNFKKELDLAKAEFYANKISESDYLLKRKFLPPFSGFKEQALEKVKNIFVSHSLKIKNKGTLHDLTPLKIKELKNTYGDLDLAVKLGKIRKYNDKYYANANGSLVRADLFVDKKNKFHAVSIYKADFSTKKLPNKTPATTSNGETKEGIEMNENYNFCMSLYKNTPISVKIKGMKEPIICYYHGFNTSGSKITYKKHDNNYHNLSEDEMVVFRKNDKESIAVGKILEIKKYSISPSGELSLIENEERKWF

SEQ ID NO: 375 - protein, 759 aa, Campylobacter jejuni
MLSVAFYKRALKDFSHLVGNCSFFTDEKRAPKNSPLAFMFVALTRIINLLNNLKNTEGILYTKDDLNALLNEVLKNGTLTYKQTKKLLGLSDDYEFKGEKGTYFIEFKKYKEFIKALGEHNLSQDDLNEIAKDITLIKDEIKLKKALAKYDLNQNQIDSLSKLEFKDHLNISFKALKLITPLMLEGKKYDEACNELNLKVAINEDKKDFLPAFNETYYKDEVTNPVVLRAIKEYRKVLNALLKKYGKVHKINIELAREVGKNHSQRAKIEKEQNENYKAKKDAELECEKLGLKINSKNILKLRLFKEQKEFCAYSGEKIKISDLQDEKMLEIDHIYPYSRSFDDSYMNKVLVFTKQNQEKLNKTPFEAFGNDSAKWQKIEVLAKNLPTKKQKRILDKNYKDKEQKDFKDRNLNDTRYIARLVLNYTKDYLDFLPLSDDENTKLNDTQKGSKVHVEAKSGMLTSALRHTWGFSTKDRNNHLHHAIDAVIIAYANNSIVKAFSDFKKEQESNSAELYAKKISELDYKNKRKFFESFSGFRQKVLDKIDEIFVSKPERKKPSGALHEETFRKEEEFYQSYGGKEGVLKALELGKIRKVNGKIVKNGDMFRVDIFKHKKTNKFYAVPIYTMDFALKVLPNKAVARSKKGEIKDWILMDENYEFCFSLYKDSLILIQTKDMQEPEFVYYNAFTSSTVSLIVSKHDNKFETLSKNQKILFKNANEKEVIAKSIGIQNLKVFEKYIVSALGEVTKAEFRQREDFKK

SEQ ID NO: 376 - protein, 984 aa, Campylobacter jejuni
MVRILAFDIGISSIGWAFSENDELKDCGVRIFTKVENPKTGESLALPRRLARSARKRLARRKARLNHLKHLIANEFKLNYEDYQSFDESLAKAYKGSLISPYELRFRALNELLSKQDFARVILHIAKRRGYDDIKNSDDKEKGAILKAIKQNEEKLANYQSVGEYLYKEYFQKFKENSKEFTNVRNKKESYERCIAQSFLKDELKLIFKKQREFGFSFSKKFEEEVLSVAFYKRALKDFSHLVGNCSFFTDEKRAPKNSPLAFMFVALTRIINLLNNLKNTEGILYTKDDLNALLNEVLKNGTLTYKQTKKLLGLSDDYEFKGEKGTYFIEFKKYKEFIKALGEHNLSQDDLNEIAKDITLIKDEIKLKKALAKYDLNQNQIDSLSKLEFKDHLNISFKALKLITPLMLEGKKYDEACNELNLKVAINEDKKDFLPAFNETYYKDEVTNPVVLRAIKEYRKVLNALLKKYGKVHKINIELAREVGKNHSQRAKIEKEQNENYKAKKDAELECEKLGLKINSKNILKLRLFKEQKEFCAYSGEKIKISDLQDEKMLEIDHIYPYSRSFDDSYMNKVLVFTKQNQEKLNKTPFEAFGNDSAKWQKIEVLAKNLPTKKQKRILDKNYKDKEQKDFKDRNLNDTRYIARLVLNYTKDYLDFLPLSDDENTKLNDTQKGSKVHVEAKSGMLTSALRHTWGFSTKDRNNHLHHAIDAVIIAYANNSIVKAFSDFKKEQESNSAELYAKKISELDYKNKRKFFEPFSGFRQKVLDKIDEIFVSKPERKKPSGALHEETFRKEEEFYQSYGGKEGVLKALELGKIRKVNGKIVKNGDMFRVDIFKHKKTNKFYAVPIYTMDFALKVLPNKAVARSKKGEIKDWILMDENYEFCFSLYKDSLILIQTKDMQEPEFVYYNAFTSSTVSLIVSKHDNKFETLSKNQKILFKNANEKEVIAKSIGIQNLKVFEKYIVSALGEVTKAEFRQREDFKK

SEQ ID NO: 377 - protein, 1003 aa, Campylobacter lari]
MRILGFDIGINSIGWAFVENDELKDCGVRIFTKAENPKNKESLALPRRNARSSRRRLKRRKARLIAIKRILAKELKLNYKDYVAADGELPKAYEGSLASVYELRYKALTQNLETKDLARVILHIAKHRGYMNKNEKKSNDAKKGKILSALKNNALKLENYQSVGEYFYKEFFQKYKKNTKNFIKIRNTKDNYNNCVLSSDLEKELKLILEKQKEFGYNYSEDFINEILKVAFFQRPLKDFSHLVGACTFFEEEKRACKNSYSAWEFVALTKIINEIKSLEKISGEIVPTQTINEVLNLILDKGSITYKKFRSCINLHESISFKSLKYDKENAENAKLIDFRKLVEFKKALGVHSLSRQELDQISTHITLIKDNVKLKTVLEKYNLSNEQINNLLEIEFNDYINLSFKALGMILPLMREGKRYDEACEIANLKPKTVDEKKDFLPAFCDSIFAHELSNPVVNRAISEYRKVLNALLKKYGKVHKIHLELARDVGLSKKAREKIEKEQKENQAVNAWALKECENIGLKASAKNILKLKLWKEQKEICIYSGNKISIEHLKDEKALEVDHIYPYSRSFDDSFINKVLVFTKENQEKLNKTPFEAFGKNIEKWSKIQTLAQNLPYKKKNKILDENFKDKQQEDFISRNLNDTRYIATLIAKYTKEYLNFLLLSENENANLKSGEKGSKIHVQTISGMLTSVLRHTWGFDKKDRNNHLHHALDAIIVAYSTNSIIKAFSDFRKNQELLKARFYAKELTSDNYKHQVKFFEPFKSFREKILSKIDEIFVSKPPRKRARRALHKDTFHSENKIIDKCSYNSKEGLQIALSCGRVRKIGTKYVENDTIVRVDIFKKQNKFYAIPIYAMDFALGILPNKIVITGKDKNNNPKQWQTIDESYEFCFSLYKNDLILLQKKNMQEPEFAYYNDFSISTSSICVEKHDNKFENLTSNQKLLFSNAKEGSVKVESLGIQNLKVFEKYIITPLGDKIKADFQPRENISLKTSKKYGLR

SEQ ID NO: 378 - protein, 372 aa, candidate division
DNESAINQIAYILTTQKADEGIRAELDSLPLSDKAKKAIVKIKPTNFKAFGHLSIKALQKITPHILEGMTYDKACEAAGYDFKKQSASLEQITNPVVKRAITQTLKVVRAIERKYGKPYFIKVETARDLAKNFKDRNAIKKENEENQGYNEDIKSIITNGYEASPKTKGGKQLLNHLKEFNVRLNKNADFNGQQIIKVKLYREQQGKCLYSGNPIDFETMLRDDNAYQVDHIVPFSRSNNDGITNKVLVFTEENQKKADRTPFEYFGTDERRWEKFVALVETTYKTRDVKTSDKATNAINYEYNGYAMKKKQNLLLQDYKNDSWNVRALNDTRYITRFIQNYLRQNVDFAEGEEKQRIIAPNGTTTAYLRKR

SEQ ID NO: 379 - protein, 1117 aa, Capnocytophaga ochracea
MKHILGLDLGSNSIGWAFVQQDFENKQGKIIATGSRIIPMDQGILGDFERGNTVSQTAERTTYRSMRRLRERHLLRRERLHRVLHLLGFLPPHYDAQIDFTKRYGKFIDNAEPKIAYNNGNFIFMNSFNEMVEDFKKHQPQLFYKKSNGEESRIPYDWTIYYLRKKALSQKITQQELAWLILHFNQKRGYYQLRGEEETENPNKEVAFHSLKVVDVEAEAPNKKGEIWYTIRLENGWIYRRTSKNPLDDWKGKTRDFIVTTDLNDDGTIKLDKEGKEKRSFRAPDENDWNLLKKKTEHDIDFSGKPVGTYIYDHLLQNPNQKIKGKLVRTIERKYYKDELKAILAKQIALQPELFTETLLADCIRELYRKNETQQQNLLSKDFLHLFVEDIIFYQRPLCSKKSTIANCTLEKRSYIDKETNERKDAPIKVCAKSNPYYQEFRVLQWLQNLRIYEIETDREVTAEFIETPQDYEALFNFLMSQKEIDNEGLLKYFLFAKNPQIKDKAAKSELKKWLTTYRWNYVYDAADNSSKKYPMNETGYELQRYLQKVEGLPANFLTFDITYQLWHLLYSVKDKVEFEKALKKFAKKKQLDKTSFVDSFKNFKPYPNEYGSFSEKAIKKLLPLMRFGNHWDFNRIDVSTQKRIDDLINGVANEDIRTIIREKAEKYQLNSETCFQDLPLWLAQYVVYNRHAEATDIEKWTSVSDLEAYLEDFKQHSLRNPIVEQVVTETLRVVRDIWQQYSGGQANFFDEIHIELGRELKKTAEERKQLSDKNQENENTNLRIKKLLAELKEDASIQNVRPYSLVQQELLKIYEEGVFSSTDEIEEDIQKIRKKVEPTPPEIQRYKLWLEQKYKSPYTGEVISLTKLFTEEYEIEHIIPQSRYYDDSLSNKVICESAVNKLKTNQLGLEFIQNHHGEKVRITANKEVTIFTEEQYKEFVKKHYANNSAKQQKLLLNEIPEKMVARQLNDTRYISKCISEILSKIVRSDEKDEGVNSKNIIPCTGKITTALKQDWGLNDVWNELILPRFERMNQLTQTQLFTSYNDRLQKNLPTVPIEYSQGFQKKRIDHRHHAMDALVIACATREHINYMNNQHALDKSKDKKEKQQSRIDLHPL

SEQ ID NO: 380 - protein, 303 aa, Capnocytophaga ochracea
MSFKQNLRVINKATNYYEKWEEKNGVLVKKKVKQEGTNWAIRKPLHKETVSGKIVLDRKIGKDKILTATRKAVDITFTEKIISSITDTGIQKILLNYLKYKGSPEVAFSAEGLEELNKNIAQYNDGKKHQPIYKVRIFEEGSKFPLGETGAKATKYVEAAKGTNLFFGVYQGKEKRTYATIPLNEVIERQKQGLPSVPERNEKGEPLLFSLSPNDLVYVPMEGEIAETIDFNNLSKEQKERIYKTVSFTGNQCFFVQEAVASPIVNKMEYSPLNKMERDILGIMIKEVCVKLKVDRLGNIIKA

SEQ ID NO: 381 - protein, 1471 aa, Capnocytophaga sp.
MCKYFYIKNFITFVLSKSIIPMKHILGLDLGSNSIGWAFVQQDFENKQGKIIATGSRIIPMDQGILGDFERGNTVSQTAERTTYRSTRRLRERHLLRRERLHRVLHILGFLPPHYDAQIDFTKRYGKFIDNAEPKIAYNNGNFIFMNSFNEMIEDFKKHQPQLFYKKSNGEESKIPYDWTIYYLRKKALSQKITQQELAWLILHFNQKRGYYQLRGEEETENPNKEVAFHSLKVVDVEAEAPNKKGEIWYTIRLENGWIYRRTSKIPLDDWKGKTRDFIVTTDLNDDGTIKVDKEGKEKRSFRAPDENDWNLLKKKTEHDIDFSGKTVGAYIYDHLLQNPNQKIKGKLVRTIERKYYKDELKAILAKQIALQPELFTETLLADCIRELYRKNETQQQNLLSKDFLHLFVEDIIFYQRPLRSKKSTIANCTLEKRSYIDKETNERKDAPIKVCAKSNPYYQEFRVLQWLQNLRIYEIETDREVTAEFIETPQDCEALFNFLMSQKEIDNKGLLKYFLFAKNPQIKDKAAKSELKKWLTTYRWNYVYDAADNSSKKYPMNETGYELQRYLQKVEGLPANFLTFDITYQLWHLLYSVKDKVEFEKALKKFAKKKQLDKTSFVDSFKNFKPYPNEYGSFSEKAIKKLLPLMRFGNHWDFNRIDVSTQKRIDDLINGVANEDIRTIIREKAEKYQLNSETCFQDLPLWLAQYVVYNRHAEATDIEKWTSVSDLEAYLEDFKQHSLRNPIVEQVVTETLRVVRDIWQQYGGGQANFFDEIHIELGRELKKTAEERKQLSDKNQENESTNLRIKKLLAELKEDASIQNVRPYSLVQQELLKIYEEGVFSATDEVEEDIQKIRKKAEPSKADLQRYKLWLEQKYKSPYTGEVISLTKLFTEEYEIEHIIPQSRYYDDSLSNKVICESAVNKLKTNQLGLEFIQNHHGEKVRITANKEVTIFTEEQYKEFVKKHYANNSAKQQKLLLNEIPEKMVARQLNDTRYISKYISEILSKIVRSDEKDEGVNSKNIIPCTGKITTALKQDWGLNDVWNKLILPRFERMNQLTQTQLFTSYNDRLQKNLPTVPIEYSQGFQKKRIDHRHHAMDALVIACATREHINYMNNQHALDKSKDKKEKQQSRIDLRTILCEKKNNNWQFKKPWSTFTQEAKEALEHIVVSFKQNLRVINKATNYYEKWEEKNGVLVKKKVKQEGTNWAIRKPLHKETVSGKIVLDRKIGKDKILTATRKAVDITFTEKIISSITDTGIQKILLNYLKYKGSPEVAFSTEGLEELNKNIAQYNNGKKHQPIYKVRIFEEGSKFPLGETGAKATKYVEAAKGTNLFFGVYQGKGKRTYATIPLNEVIERQKQGLPSVPERNEKGEPLLFSLSPNDLVYVPMEGEIAETIDFNNLSKEQKERIYKTVSFTGNQCFFVQEAVATPIVNKMEYSPLNKMERDILGTMIKEVCIKLKVDRLGNITKA

SEQ ID NO: 382 - protein, 1450 aa, Capnocytophaga sp.
MKHILGLDLGSNSIGWAFVQQDFENKQGKIIATGSRIIPMDQGILGDFERGNTVSQTAERTTYRNTRRLRERHLLRRERLHRVLHILGFLPPHYDSQIDFTKRYGKFIDNAEPKIAYNNGNFIFMNSFNEMIEDFKKYQPQLFYKKSNGEESKIPYDWTIYYLRKKALSQKITQQELAWLILHFNQKRGYYQLRGEEETENPNKEVAFHSLEVVDVEAEAPNKKGEIWYTIRLENGWIYRRTSKIPLDDWKGKTRDFIVTTDLNDDGTIKLDKEGKEKRSFRAPDENDWNLLKKKTEHDIDFSGKTVGAYIYDHLLQNPNQKIKGKLVRTIERKYYKDELKAILAKQIALQPELFTETLLADCIRELYRKNETQQQNLLSKDFLHLFVEDIIFYQRPLRSKKSTIANCTLEKRSYIDKETNERKDTPIKVCAKSNPYYQEFRVLQWLQNLRIYEIETDREVTAEFIETAQDNEALFNFLMSQKEIDNESLLKYFLFAKNPQIKDKVAKSELKKWLTTYRWNYVYDAADNSSKKYPMNETGYELQQYLQKVEGLPANFLTFDITYRLWHLLYSVKDKVEFEKALKKFAQEYQLDEASFVDSFKNFKPYPNEYGSFSEKAIKKLLPLMRFGNHWDFNRIDVSTQKRIDDLINGVANDEIRTIIREKAEKYQLNSETCFQGLPLWLAQYVVYNRHAEAADIEKWTSVNDLEAYLEDFKQHSLRNPIVEQVITETLRVVRDIWQRYGGGQANFFDEIHIELGRELKKTAEERKQLSNRNQENENTNLRIKKLLAELKEDASIQNVRPYSPVQQELLKIYEEGVFSATDEVEEDIQKIRKKAEPTTPEIQRYKLWLEQKYKSPYTGEVISLTKLFTEEYEIEHIIPQSRYYDDSLSNKVICESAVNKLKTNQLGLEFIQNHHGEKVRITANKEVTIFTEEQYKEFVKKHYANNSAKQQKLLLNEIPEKMVARQLNDTRYISKYISEILSKIVRSDEKDEGVNSKNIIPCTGKITTALKQDWGLNDVWNELILPRFERMNQLTQTQLFTSYNDRFQKNLPTVPIEYSQGFQKKRIDHRHHAMDALVIACATREHINYMNNQHALDKSKDKKEKQQSRIDLRTILCEKKNNNWQFKKPWSTFTQEAQEALEHIVVSFKQNLRVINKATNYYEKWEEKNGVLVKKKVKQEGTNWAIRKPLHKETVSGKIVLDRKIGKDKILTATRKSVDITFTEKIISSITDTGIQKILLNYLKYKGSPEVAFSAEGLEELNKNIAQYNDGKKHQPIYKVRIFEEGSKFPLGETGAKATKYVEAAKGTNLFFGVYQGKGKRTYATIPLNEVIERQKQGLPSVPERNEKGEPLLFSLSPNDLVYVPMEGEIAETIDFNNLSKEQKERIYKTVSFTGNQCFFVQEAVATPIVNKIEYSPLNKMERDILGTMIKEVCIKLKVDRLGNITKA

SEQ ID NO: 383 - protein, 1435 aa, Capnocytophaga sp.
MKNILGLDLGTTSIGFAHIVEDENKEKSEIKELGVRIVSLATDEQSDFEKGKSISTNANRTLKHGARLNLDRYQQRRKFLIDLLQKANLITSASILAENGKNTTHSTWQLRAKAVTERIEKEEFARVLLAINKKRGYKNSRKTKTEDEGQAIDGMAIAKCLYDENLTPGQLSLQLLQQNKKLLPDFYRSDLQKEFDLVWNLQKQFYPDILTDSFYKELQGKGKDATSKAFSKRYHFDTAENKGSKESVRLQAYQWRAEAISKQLSKEEVAYVLTEINNNLNNSSGYLGAISDRSKELYFNRQTVGQYLYAQLQENRHNSLKNKVFYRQDYLDEFERIWETQASFHKELTDELKKQIRDVVIFYQRKLKSQKGLVSFCEFESKEIEIEKDGKAITKSIGARVVPKSSPLFQEFKIWQILNNVTCKRKGIRKKKSSAKSTELDLFNEPSQSIFSLDMECKQLLFDELNLKGDLKSDKVLKLLGYSPQEWEINYNQLEGNRTQKSLYEAYLKIIEIEGYEVKDILQIKSTKDDWSLDESPLSASEIRERVKVIFQTLGICTKILYFDPLLPVKEFEQQYSYQLWHLLYSYESDDSTSGNETLYRILEKKYAFKREHATILANVALQDDYGSLSTKAIRKIYPYIKENQYSTACELAGYKHSKLSLTTEELEARELKNIIPLLKKNALRNPVVEKILNQMINVVNALIEKNSERDAEGKITKYFHFDEIRIELARELKKNAQERYEMTQNINKAKLEHQKISEKLQKQFGIKNPTKSDIIRYRLYQELEHNGYKELYTNTYIAPDVLFSKNIDIEHIVPKARVFDDSFSNKTLAFKEFNIKKGESTAFDYITSLNCEGELNQYLTRVENAYKTKSISLTKYKNLLKKASEIGDGFINRDLRDTQYIAKKAKEILFQVTKNVLSTSGSITDRLREDWGLVDVMKELNMPKYQSLGLTEVEERKDGNKVTVIKDWTKRNDHRHHAMDALTVAFTKPSYIQYLNHLNARKDENNKNYSVILAIEKKETIKVPINNGKNKRVFIEPILNFRQVAKKHLEEIFISHKAKNKVVTKNINKPAGTDKQQITLTPRGQLHKETIYGKYQYYVNKEEKVGVKFDERTITKVSNPLYREALLKRLQANDNDPKKAFAGKNALSKNPIYLDEAKTKTLPEKVNLTYLEEDFSIRKDISPDNFKDLKSIEKVIDQGVKRILIKRLQAYDNDPKKAFVDLEKNPIWLNKEKGIAIKRVTISGVSNAQPLHIGKDHLGKTTLNKEGKEVPVDYVSTGNNHHVAIYRDKEGNLQEQIVSFFEAVVRAQQGLPIIDKNYKQAEGWQFMFTMKQNEMFVFPNEATGFNPAEIDLLDPKNKKLISPNLFRVQTISIVKYGNSVVRDFKFRHHLETTLQDDKILQGITFQQIKSLEPLRNIVKVRINHLGDIVNIGEY

SEQ ID NO: 384 - protein, 1432 aa, Capnocytophaga sp.
MKNILGLDLGTTSIGFAHIVEDENKEKSEIKELGVRIVSLTTDEQSDFEKGKSITTNANRTLKHGARLNLDRYQQRRKYLIDLLHKANLITPSSILAENGKNTTHSTWQLRAKAVTERIEKEEFARILLAINKKRGYKSSRKAKTEDEGQAIDGMAIAKRLYDENLTPGQLSLQLLQQNKKLLPDFYRSDLQKEFDLVWNFQKQFYPDILTDIFYKELQGKGKDATSKAFSKRYHFDTAENKGSKESVRLQAYQWRAEAVSKQLSKEEVAYVLTEINNNLNNASGYLGAISDRSKELYFNRQTVGQYLYAQLQENRHNSLKNKVFYRQDYLDEFERIWETQALFHKELTDELKKQIRDVVIFYQRKPKSQKGLISFCEFESKEIEIEKDGKTITKNIGARVVPKSSPLFQEFKIWQILNNVICKRKGIRKKKISAKTTQLDLLNESSQTIFSLDMECKQLLFDELNLKGDLKSDKVLKLLGYSPQEWEINYNQLEGNRTQKALYEAYLKIVEMEAHDVKDILQIKSTKDDWSLDESPLSASEIRESVKAIFQALGICTKILYFDPLLPVKDFEEQDSYQLWHLLYSYESDDSTSGNETLYRILEKKYAFKREHARILANVALQDDYGSLSTKAIRKIYPNIKENQYSTACEMAGYKHSKLSLTTEELEARELKNIIPLLKKNALRNPVVEKILNQMINVVNALIEKNSERDAEGKITKYFHFDEIRIELARELKKNAQKRYEMTQNINKAKSEHQKISEILQKEFGIKNPTKSDIIRYRLYKELEHNGYKELYTNTYIAPDVLFSKNIDIEHIVPKARVFDDSFSNKTLAFKDFNIKKGESTAFDYITSLKNEEKLNQYLARVENAYKTKNISPAKYKNLLKKASEIGDGFINRDLRDTQYIAKKAKEILFQVTKNVLSTSGSITDRLREDWSLVDVMKELNMPKYQSLGLTEVEERKDGNKVTVIKDWTKRNDHRHHAMDALTVAFTKPSYIQYLNHLNARKDENNKNYSVILAIEKKETIKVPTNNGKNKRVFIEPIPNFRQVAKKHLEEIFISHKAKNKVVTKNTNKPAGTNKQQITLTPRGQLHKETIYGKYQYYVNKEEKVGVKFDKETIAKVSNPLYREALLKRLQANDNDPKKAFTGKNALSKNPIYLDEAKTKTLPEKVNLTYLEEDFSVRKKIVPKNPTSKEFVPNLKSIEKVVDEGVRNILIERLRVYNNDPEKAFVDLEKNPIWLNKEKGIAIKRVTISGVNNAQPLHIGKDHLGKTTLNKEGKEIPVDYVSTGNNHHVAIYRDKEGNLQEQIVSFFEAVVRTQQGLPIIDKTYKQEEGWQFLFTMKQNEMFVFPNEATGFNPAEIDLLDPKNKKQISPNLFRVQKIATKDYFFRHHLETNVETDNVLKNTTWKREGLSGLKDIVKVRINHLGDIVSIGEY

SEQ ID NO: 385 - protein, 1426 aa, Capnocytophaga sp.
MKNILGLDLGTTSIGFTHIVEDENKEKSEIKELGVRIVSLTTDEQSDFEKGKSISTNANRTLKHGARLNLDRYQQRRKFLIDLLQKANLITSSSILAENGKNTTHSTWQLRAKAVTERIEKEEFARVLLAINKKRGYKSSRKAKTEDEGQAIDGMAIAKRLYDENLTPGQLSLQLLQQNKKLLPDFYRSDLQKEFDLVWNFQKQFYPDILTDSFYKELQGKGKDATSKAFSKRYHFDTAENKGSRESVRLQAYQWRAEAISKQLSKEEVAYVLTEINNNLNNASGYLGAISDRSKELYFNRQTVGQYLYAQLQENKHNSLKNKVFYRQDYLDEFERIWETQASFHKELTEELKKQIRDVVIFYQRKLKSQKGLISFCEFESKEIEIEKDGKTITKSIGARVVPKSSPLFQEFKIWQILNNVTCKRKGIRKKKSSAKSTELDLFNEPSQTIFSLDMECKQLLFEELNLKGDLKSDKVLKLLGYSPQEWEINYNQLEGNRTQKALYEAYLKIVEMEAHDVKDILQIKSTKDDWALEESPLSASEIRERVKAIFQTLGICTKILYFDPLLPVKEFEEQDSYQLWHLLYSYESDDSTSGNETLYRILEKKYAFKREHATILANVTLQDDYGSLSTKAIRKIYPYIKENQYSTACEKAGYKHSKLSLTTEELEARELKNIIPLLKKNALRNPVVEKILNQMINVVNALIEKNSERDAEGKITKYFHFDEIRIELARELKKNAQERYEMTQNINKAKLEHQKISGILQKEFGIKNPTKSDITRYRLYQELAHNGYNDLYTNTYIPKELLFSKNIDIEHIVSKARVFDDSFSNKTLAFREFNIKKGESTAFDYITSLNNEEELNQYLNRVENAYKTKNISPAKYKNLLKKASEIGDGFINRDLRDTQYIAKKAKEILFQVTKNVLSTSGSITDRLREDWGLVDVMKELNMPKYQSLGLTEVEERKEGNKVTVIKNWTKRNDHRHHAMDALTVAFTKPSYIQYLNHLNARKDKNNKNYSVILAIEEKETIKVPTNNGKNKRVFIEPIPNFRQVAKKHLEEIFISHKAKNKVVTKNTNKPAGTDKQQITLTPRGQLHKETVYGKYQYYVNKEEKIGVKFDKETIAKVSNPVYREALLKRLQANDNDPKKAFAGKNALSKNPIYLDEAKTKTLTEKVNLTYLEEDFSIRKDISPDNFKDLKSIEKVIDQGVKRILIKRLQDYDNDPKKAFVDLEKNPIWLNKEKGIAIKRVTISGVNNAQPLHIGKDHLGKTTLNKEGKEIPVDYVSTGNNHHVAIYRDKEGNLQEQIVSFFEAVVGAQQGLPIVDKTYKQAEGWQFLFTMKQNEMFVFPNEATGFNPAEIDLLDPKNKKQISPNLFRVQKIATKDYFFRHHLETNVDTDNVLKNTTWKREGLSGLKDIVKVRINHLGDIVSIGEY

SEQ ID NO: 386 - protein, 1450 aa, Capnocytophaga sp.
MKRILGLDLGSNSIGWAFVEQDFENKQGKIIATGSRIIPMDQGILGDFEKGNTVSQTAERTTYRSMRRLRERHLLRRERLHRVLHILGFLPPHYDAQIDFTKRYGKFIDNAEPKIAYNNGNFIFMNSFNEMIEDFKKYQPQLFYKKSNGEESKIPYDWTIYYLRKKVLSQKITQQELAWLILHFNQKRGYYQLRGEEETENPNKEVAFHSLKVVDVEAEAPNKKGEIWYTIRLENGWIYRRTSKIPLDDWKGKTRDFIVTTDLNDDGTIKVDKEGKEKRSFRAPDENDWNLLKKKTEHDIDFSGKTVGAYIYDHLLQNPNQKIKGKLVRTIERKYYKDELKAILAKQIALQPELFTETLLADCIRELYRKNETQQQNLLSKDFLHLFVEDIIFYQRPLRSKKSTIANCTLEKRSYIDKETNERKDTFIKVCAKSNPYYQEFRVLQWLQNLRIYEIETDREVTAEFIETAEDYEALFNFLMSQKEIDNEGLLKYFLFAKNPQIKDKVAKSELKKWLTTYRWNYVYDAADNSSKKYPMNETGYDLQRYLQKVEGLPANFLTFDITYRLWHLLYSVKDKVEFEKALKKFAQEYQLDEASFVDSFKNFKPYPNEYGSFSEKAIKKLLPLMRFGNHWDFNRIDVSTQKRIDDLINGVANDEIRTIIREKAEKYQLNSESCFQGLPLWLAQYVVYNRHAEATDIEKWTSVSDLETYLEDFKQHSLRNPIVEQVVTETLRVVRDIWQQYGGGQANFFDEIHIELGRELKKTAEERKQLSNRNQENENTNLRIKKLLAELKEDASIQNVRPYSPVQQELLKIYEEGVFSSTDQVEEDIQKIRKKAEPTTPEIQRYKLWLEQKYKSPYTGEVISLTKLFTEEYEIEHIIPQSRYYDDSLSNKVICESAVNKLKTNQLGLEFIQNHHGEKVRITGNKEVTIFTEEQYKEFVKKHYANNSAKQQKLLLNEIPEKMVARQLNDTRYISKYISEILSKIVRSDEKDEGVNSKNVIPCTGKITTALKQDWGLNDVWNELILPRFERMNQLTQTQLFTSYNDRFQKNLPTVPIEYSQGFQKKRIDHRHHAMDALVIACATREHINYMNNQHALDKNKDKKEKQQSRIDLRTILCEKKNNNWQFKKPWSTFTQETKEALEHIVVSFKQNLRVINKATNYYEKWEEKNGVLVKKKVKQEGTNWAIRKPLHKETVSGKIVLDRKIGKDKILTATRKEVDITFTEKIISSITDTGIQKILLNYLNYKGSPEVAFSAEGLEELNKNIAQYNDGKKHQPIYKVRIFEEGSKFPLGETGAKATKFVEAAKGTNLFFGVYQGKEKRSYATIPLNEVIERQKQGLPSVPERNEKGEPLLFSLSPNDLVYVPMEGEIAETIDFNNLSKEQKERIYKTVSFTGNQCFFVQEAVATPIVNKMEYSPLNKMERDILGTMIKEVCIKLKVDRLGNITKA

SEQ ID NO: 387 - protein, 1437 aa, Capnocytophaga sp.
MKYIKYILGLDIGSNSIGWALIQLDLLQKTKRIIATGSRIIPMDQKVLSDFGKGITISPTAQRTSYRNARHCRERHLLRRERLHRVLHILGFLPTHYDKQIDFSKRYGKFVDNTEPKIAYNERKFLFMDSFQEMLADFKIHQPDLFYTKKNGEESKIPYDWTIYYLRKKALSRKISKEELAWIILNFNQKRGYYQLREEEEENKENDFEIISSKIISVIKKDKDKKYNKYWYDIILENGLVYQAAFYNDFVYNWINQDREFIIERISLKNGTEKVKLSYLPTFDEIDKMDKKEQDKYYKKIKIKTENSIGNKTVGCYIYDHILQNPNEKIKGKLVRTIERKYYKEELKAILEKQVALQPELFTDQLFADCIRELYSKNEAQQRNLAARDFVHLFVEDIIFYQRSLRRQKSTLANCSLESRSYIDKDSHTRKEAPLKVCPKSNPYYQEFRVLQWLQNLKIYEIDTDQEVTHEFIKTLEDKQQFFDFLMNQKEIDCEELLKYFLNQTYPNAREKALKSELKKWKDTYRWNYVYDIGEKSSKKYPMNETRYELKRHLEKVANLPDDFLSSEVEYLLWHLIYSVKDKVAYEKGLKTFAQKHHLDKDSFVESFKKFKPYPSEYGSFSEKAIRKLLPLMRFGSYWDFNHIDKNTQKRIEDLITGVENEEIRTILREKAEKYQLEKETDFQDLPLWLAQYIVYNRHAEASSLEKWTSVNDLETYLNEFKQYSLRNPIVEQVVMETLRVVRDIWQQYGQGQASFFDEIHIELGRELKKTAKEREKLSKQNQKNEDINLSIKEKLKELEKYNTRAYSITHQEKYKLWLEQKHISPYTGQIISPENLFTDNYEIEHIIPQSRFFDDSLSNKVVCESIVNKAPYKDRQLGLEFIKNQGGRIVKELSTENKTIKIFTEEQYRTFIKEHYSNNPEKTKKLLLEEIPEKMVARQMNDTCYISKFISEILSKIVRSDEQDEGVHSKNVILCTGKITSALKQDWGVNDVWNDLILPRFERMNDLTQSTLFTTYNEKYQKYLPTVPMEYSNGFQKKRIDHRHHAMDAIIIACATREHINYINNQHALEKGKDKKEKQKEHDKLREKLCIKKDNKGSEENYSWIFKKPWDTFTQEVQAALEGIVVSFKQNLRVINKATNYYERWVEENGKYIKKMVKQEGTNWAIRKPLHEETISGKIYLDREEITKNDILTATRKTVDSSFDEKRIKKITDTGIQKILLNYLKYKGSPEIAFSPEGLEELNKNLSIYNDGKPHKPIYKVRIYEKGSGRFALGEKGRKYKKYVQGAPNLYFGIYQGANKRSFATIPLNEVIERQKQGRPSIPEYNEKGDPLLFSLSPNDLVYVPVEGEIIEDIDFQNLSKEQKERIYNVNDFSSTCYFTPNRIAKAIFPKEVDLQRKGDKLPGSYDTKTASLEGIQIKEVCIKLKIDRLGNISKA

SEQ ID NO: 388 - protein, 1140 aa, Catellicoccus marimammalium
MKNMTKVNVGLDVGISSAGWSVINAETNQILESGVRLFSGSDADENVNRRNQRQGRRLFRRRKLRIQEAKKYLENVFQLKDIEPKDEWNPYEIRVRALNEKVSKEELSIALLNIVKHRGISYELEDVTDEEGTNTQSFQSGLDYNRRLLKTKTVGEIQYDRLQKYGQVRGQIQTEDGLLINIFPTKNYVEEVERILETQKKYHPEIDDVFIEKIISFVTRKREYFVGPGNEKSRTDYGIYRENGETLDNLFEILIGKDKFYPEEYRAAGSSYTAQIFNLLNDLNNLRIPTTEDHHLTKAQKEEIITELKNTSRLSGGMLKLISKVTKAPKEEISGYRKDEKDKPDLHSLAYYRKQKNMLEKEGIQIADFSEELLDELATMMTLNTEPGEIRKQLNKITNQYDILTPEVIEVLVKNHTAFVATSNHKWHRFSLKLMKEFIPELLETSKEQSTILCERGFIQNRASYLDENHHFNYAELRENLYNPVVRKSTCEMLKVFTAIQEKYPNIQNVIVELPRETNEDEQKRKIKKINDNNAKRKKEILKEAQAQSGLSEEALEEKLLKTKGLYLKLMLWYEQEGKCVYSGQEIPLSDLLQNKGGYEVDHIIPISISFDDRLCNKVLVRQQLNSQKSNQTPFEYMTTHTDGHLSFHELKELVGKNKRFSKEKRELLLAEIYSNDIETRKRFINRNLVDTSYTARIVLNALQQYKKENQLSMNVSVVRGAMTNILRKKVKLDKTRETFHHHAIDASLMAVIPNIEFFKERKEWLPKSANEEVVEVEVSEEETMPEKEFKVKMRLPESFIQDVQILQRNSFAKEEVSGPQTRERNLKIKFSHQVDQKMNRKVADDTIYGTRQAQLGKDKKEETYVIGKIKDIYNYDEYVRFKKRYDKNKESFLMYHHDPQTFEKLEEILAQYPEYIEDEKGKKKKVSPFALYREENGPVTKYAKKNNGPVIKQLKYYDSKLNRKIDISHKYSTKNRQVVLQSLKPYRTDVYRNQDTGEYTLVGIDQNDGKFVNGHYGIPKSRYEEIKANNKLSEHDEFVFSLYKNSMVKVIDENGESIVVRYLSRSMPNRKNNAEIKPVEKYQFEDGEVVPVYGKCRKQMQTVFVKKGWTLLKGNTDILGNTYFVEKESENPKKMIDDK

SEQ ID NO: 389 - protein, 1419 aa, Chryseobacterium sp.
MMIKNILGLDLGTNSIGWALIKQNFENKYGEILGMGSRIIPMSQDVLGEFGKGNSVSQTAARTGYRGVRRLRERFLLRRERLHRVLNVLNFLPEHYASQIDFEKRFGKFKYETEPKLAYNNDGFFFKNSFDEMLGDFKDHQFHLLENGRKVPYDWTIYYLRKKALSQKIEKEELAWILLNFNQKRGYYQLRGEDFEEEKDRVFVRLKVDRVVDSGENIKGKILYDVYFENGWKYEKQIVKTEDWIGRTKEFIVTESILKNGDTKRTFKAVDSEKDWIAIKTKTEQEIDKSHKTVGAYIYEALLQNPKQKIKGKLVRTIERKFYREELKKILERQKEFHPELQSDDLYNDCIRELYRNNEAHQITLSKKDFVHLLLNDLIFYQRPLRSQKSSVSNCTLEFRKYKDENGVEHAQYLKTIPKSNPYYQEFRVWQWMFNLNIYRKDDDTNVTKEFLSSTEDYETLFEFLNNRKEVDQKALLRHFKLNEKTHRWNYVEDKKYPCNETKTMISTRLEKVENYPSDFLTREMEQNIWHIIYSVNDKIEYEKALKSFAHKNNLDENSFFEAFKKFPPFKSEYGSFSEKAIKKLLPLLRLGKYWNWESIDRKSQGRIEKIITGEFDGNIKDKVREKAIHLTAENDFQGLQLWLAQYIVYGRHSEASMIGKWNSADDLEEFLKGFKQHSLRNPIVEQVITETLRVVKDIWLKYGNGAKDFFSEIHIELGREMKQTKDERVDATKRITENENTNLRIKALLAEMMNDNSVENIRPYSPMQQEILKIYEDGILKSDIEIDDDILKISKTAQPSSSDLKRYKLWLEQRYKSPYTGQIIPLNKLFTSEYEIEHIIPQSRYFDDSFSNKIICESAVNKLKDNYIGLGFIKQFGGMIVECGFGKSVEIFKAEEYEDFVKKHYANNRSKRNKLLLEEIPEKMIDRQLNDTRHISKYISGVLSNIVRQEDGTDEGVNSKNIVPGNGKITTQLKQDWGLNDVWNELILPRFERMNQLTNSTDFTSWNKNHQKFLPTVPIEFSKGFSKKRIDHRHHAMDALVIACATKDHINLLNNQSAKSDTKRYDLKRKLMKFERVVYSHSKTGEKIEKEVPKQFLKPWDNFTVDAKNKMETIIVSFKQNLRVINKATNHYEKWIEKDGIKRKELIKQEGTNWAIRKPMHKETVSGKVDLPGIKIPKGKILTATRKSLDTSFDLKTINSITDTGIQKILKNYLEFKGSSELAFSPEGIEDMNKNIEKFNDGKPHQSINKVRIFELGSKFSVGQTGNKKDKYVEAAKGTNLFFAVYEDKNGKRSYETIPLNEVIERQKQGLDSVSFKNKEDFLLCPNDLVYVPSEDELENIYNIDFKNLTTEKTGNIYKVVSFSGNQIFFIRQDIAISIVNKAEFSTLNKMERAIDGSMIKENCIKLKIDRLGNIAKI

SEQ ID NO: 390 - protein, 1065 aa, Clostridium perfringens
MNKDINYALGLDIGITSVGWAVINLDLNRIEDLGVRIFNAAENPKDGSSLALPRRLARGRRRLLRRKAYRVERVRKLIVKNNILTKEELEGLFKNKEVIDVWEARVKGLDYKLSREEWAKILINFCKRRGFKSNRKNETKDKEAGQILSSISYNIEKMKETNSRTIGEYIYNEVKNSDDSYAPLRNKFGEYKMCVSRDVLREEIHTLFEKQRELGNNFASDEIEDKYFEIFNSQRPFSNFEDLEKLVGFCTFERKKHKRAPKHCISSEEFTLYEGINKLSIIKDGEKRKLSEEERTLVVNEAFNKKEIKYTTLRKLLGLSEDELFSTLTYSIDKDISKTENTKFVSLKGYHEIKRAIEKGVSKKAWQDIENNRNLLNDIAYVLTLGKTDDEIEKQLRLRNVPEELFESLLDMSFSKFNNLSIYALEKILPFMKEGYQYNEACEKAGYNFKAIYEGVRTKKLPVIEIDEIVNPVVNRALAQTRKVINSVIDKYGSPVRINIELARDLAKNFKDRKLIEKEQKENRANLDKIRENLRELMDKEPTAVEVLKYRLWEQQRGECAYTQSQIALERLFSPGYCEIDHIIPFSRSFDDSLSNKILVLGSENQRKGNKIPYEYFGEDSERWNSFEIWVKGSYLNYKKKANLLKKKFTEEEQRDWKARNLQDTKYICRYISNFVNNRLEFKESENKQKVITVNGRATAYLRSRWGLNKVREDGDKHHALDAAVVGVTTQGMVQKISKYSKAHELYTVRKNDEFVDVETGECVDVDEYKEIRKDILPRPWRGFSEELKLRLSDNPLEELKKLPIETYNEEFIKENVKPIFVSRVPFRKISGKLFKETIYSERAFKDGYFVSKKSLVDLKRGDLDNFYNYECDKKLYDAISERMKEFNYNGKKAFESPFRKPTKSGKEGPVVRSVKIKSAAPFKDGIPMNEGLVAKEGMVRIDIYEKEGKYFVVPVYRYQLAKGIVPKRAAIAGKSELKWPIMDQTYNFKFSIFKNDLIEIKYAKKDGYFGYYDGFDRHTASLVIENHDNSDRYRGIGVKTGVVEFNKYEVDVLGNYHKVNLGGN

SEQ ID NO: 391 - protein, 1099 aa, Corynebacterium accolens
MSLSYRVGIDVGTYSLGCTAIEVDDNDQPVNILSSVSLIHDSGLDPDQQKRAVTRLASSGVARRTRRLYRRRRRRMINLEKFLTSQGWETRPFEHYSDPYLPWNARVALVNGYISDDAQRGMYLSIAFRHIANHRGWRNPYWKVSSLYSPDKPSDAFEQIRKELEESTGHKIPETVTVGQLISFAQFGKDRLRGGGKKKDEKKPQEQVNQAVISARLHQIDHAREINEICRVQKIDDALRKQILDLVFAAESPKGAQIGRVGKDPLQPKLPRALKASDAFQQYRIVALAGNLRIYRDGVSTPLDRDEKLIVFNYLINLSHKEEPSWLKVAEVLNIDRGQLHGTATMTDDGERAGAAPPVHDTNRTILGCKIKPLVHWWEGANDDERAAMLKALSNSEVEDFDSPAGAQTQAFFANLDESEQEKLDSLHLPIGRAAYSEDTLMRLTSRMLDENLDLYEARLAEFDIPKDWAPPAPRIGEPVGNPAVDRVLKGVARWLEAAADEWGAPKSVVIEHVRDGFISKSKANEIDRANNARHKRNRELFKQMQENLGIDGKLRSSDLWRYQSVQRQNCQCAYCGSPITYTTCEMDHIVPRAGEGSTNTRDNLVATCHRCNLAKKNIPFAVWAAQTNIPGVSVKEALDRTRHWSEDSGMTSKDFKKFRKNVCDRLKRTVVDEPLDARSMESVAWMANELRGRVAQRFQEENTVVNVYRGELTAEARRAAGISDKLRFIDGTGKSRLDRRHHAVDAAVVAFTQNYVAETLAIRSNKKREAQLLQAAEQWKEFTGSDAEHRAAWNAWLPKMQKLAVLLQKALDEDRIAVTSNLRLRLGNGRAHEDSIGELKTIRVGDAISVTDIDRASSEALWCALTREPDFDENNGLPENPDRRIRIHGTWYDAEDDIEVFPVGAGAIKVRGGYAELSRFHHARIYKIPGKKAPVYCMLRVYNADLIRHRHEDLFSVEIKPQTMSVRQAEPKLRKALAENTAEYLGWLVTDDELVIDTSNFNTGQIAEMQSELGQVRRWRLDGFYSPSTLRLRPLQMSAEGLREDTSIGAKKIIDRPGWLPAINKLFGEGHVTVVRRDALGRARLTSNAHLPISWKAE

SEQ ID NO: 392 - protein, 1084 aa, Corynebacterium diphtheriae
MKYHVGIDVGTFSVGLAAIEVDDAGMPIKTLSLVSHIHDSGLDPDEIKSAVTRLASSGIARRTRRLYRRKRRRLQQLDKFIQRQGWPVIELEDYSDPLYPWKVRAELAASYIADEKERGEKLSVALRHIARHRGWRNPYAKVSSLYLPDGPSDAFKAIREEIKRASGQPVPETATVGQMVTLCELGTLKLRGEGGVLSARLQQSDHAREIQEICRMQEIGQELYRKIIDVVFAAESPKGSASSRVGKDPLQPGKNRALKASDAFQRYRIAALIGNLRVWVDGEKRILSVEEKNLVFDHLVNLTPKKEPEWVTIAEILGIDRGQLIGTATMTDDGERAGARPPTHDTNRSIVNSRIAPLVDWWKTASALEQHAMVKALSNAEVDDFDSPERAKVQAFFADLDDDVHAKLDSLHLPVGRAAYSEDTLVRLTRRMLSDGVDLYTARLQEFGIEPSWTPPTPRIGEPVGNPAVDRVLKTVSRWLESATKTWGAPERVIIEHVREGFVTEKRAREMDGDMRRRAARNAKLFQEMQEKLNVQGKPSRADLWRYQSVQRQNCQCAYCGSPITFSNSEMDHIVPRAGQGSTNTRENLVAVCHRCNQSKGNTPFAIWAKNTSIEGVSVKEAVERTRHWVTDTGMRSTDFKKFTKAVVERFQRATMDEEIDARSMESVAWMANELRSRVAQHFASHGTTVRVYRGSLTAEARRASGISGKLEFLDGVGKSRLDRRHHAIDAAVIAFTSDYVAETLAVRSNLKQSQAHRQEAPQWREFTGKDAEHRATWRVWCQKMEKLSALLTEDLRDDRVVVMSNVRLRLGNGSAHEETIGKLSKVKLGSQLSVSDIDKASSEALWCALTREPDFDPKDGLPANPERHIRVNGTHVYAGDNIGLFPVSAGSIALRGGYAELGSSFHHARVYKITSGKKPAFAMLRVYTIDLLPYRNQDLFSVELKPQTMSMRQAEKKLRDALATGNAEYLGWLVVDDELVVDTSKIATDQVKAVEAELGTIRRWRVDGFFGDTRLRLRPLQMSKEGIKKESAPELSKIIDRPGWLPAVNKLFSEGNVTVVRRDSLGRVRLESTAHLPVTWKVQ

SEQ ID NO: 393 - protein, 1084 aa, Corynebacterium diphtheriae
MKYHVGIDVGTFSVGLAAIEVDDAGMPIKTLSLVSHIHDSGLDPDEIKSAVTRLASSGIARRTRRLYRRKRRRLQQLDKFIQRQGWPVIELEDYSDPLYPWKVRAELAASYIADEKERGEKLSVALRHIARHRGWRNPYAKVSSLYLPDGPSDAFKAIREEIKRASGQPVPETATVGQMVTLCELGTLKLRGEGGVLSARLQQSDHAREIQEICRMQEIGQELYRKIIDVVFAAESPKGSASSRVGKDPLQPGKNRALKASDAFQRYRIAALIGNLRVRVDGEKRILSVEEKNLVFDHLVNLAPKKEPEWVTIAEILGIDRGQLIGTATMTDDGERAGARPPTHDTNRSIVNSRIAPLVDWWKTASALEQHAMVKALSNAEVDDFDSPEGAKVQAFFADLDDDVHAKLDSLHLPVGRAAYSEDTLVRLTRRMLADGVDLYTARLQEFGIEPSWTPPAPRIGEPVGNPAVDRVLKTVSRWLESATKTWGAPERVIIEHVREGFVTEKRAREMDGDMQRRAARNAKLFQEMQEKLNVQGKPSRADLWRYQSVQRQNCQCAYCGSPITFSNSEMDHIVPRAGQGSTNTRENLVAVCHRCNQSKGNTPFAIWAKNTSIEGVSVKEAVERTRHWVTDTGMRSPDFKKFTKAVVERFQRATMDEEIDARSMESVAWMANELRSRVAQHFASHGTTVRVYRGSLTAEARRASGISGKLKFFDGVGKSRLDRRHHAIDAAVIAFTSDYVAETLAVRSNLKQSQAHRQEAPQWREFTGKDAEHRAAWRVWCQKMEKLSALLTEDLRDDRVVVMSNVRLRLGNGSAHKETIGKLSKVKLGSQLSVSDIDKASSEALWCALTREPDFDPKEGLPANPERHIRVNGTHVYAGDNIGLFPVSAGSIALRGGYAELGSSFHHARVYKITSGKKPAFAMLRVYTIDLLPYRNQDLFSVELKPQTMSMRQAEKKLRDALATGNAEYLGWLVVDDELVVDTSKIATDQVKAVEAELGTIRRWRVDGFFSPSKLRLRPLQMSKEGIKKESAPELSKIIDRPGWLPAVNKLFSDGNVTVVRRDSLGRVRLESTAHLPVTWKVQ

SEQ ID NO: 394 - protein, 1084 aa, Corynebacterium diphtheriae
MKYHVGIDVGTFSVGLAAIEVDDAGMPIKTLSLVSHIHDSGLDPDKIKSAVTRLASSGIARRTRRLYRRKRRRLQQLDKFIQRQGWPVIELEDYSDPLYPWKVRAELAASYIADEKERGEKLSVALRHIARHRGWRNPYAKVSSLYLPDEPSDAFKAIREEIKRASGQPVPETATVGQMVTLCELGTLKLRGEGGVLSARLQQSDHAREIQEICRMQEIGQELYRKIIDVVFAAESPKGSASSRVGKDPLQPGKNRALKASDAFQRYRIAALIGNLRVRVDGEKRILSVEEKNLVFDHLVNLAPKKEPEWVTIAEILGIDRGQLIGTATMTDDGERAGARPPTHDTNRSIVNSRIAPLVDWWKTASALEQHAMVKALSNAEVDDFDSPEGAKVQAFFADLDDDVHAKLDSLHLPVGRAAYSEDTLVRLTRRMLADGVDLYTARLQEFGIEPSWTPPAPRIGEPVGNPAVDRVLKTVSRWLKSATKTWGAPERVIIEHVREGFVTEKRAREMDGDMRRRAARNAKLFQEMQEKLNVQGKPSRADLWRYQSVQRQNCQCAYCGSPITFSNSEMDHIVPRAGQGSTNTRENLVAVCHRCNQSKGNTPFAIWAKNTSIEGVSVKEAVERTRHWVTDTGMRSTDFKKFTKAVVERFQRATMDEEIDARSMESVAWMANELRSRVAQHFASHGTTVRVYRGSLTAEARRASGISGKLEFLDGVGKSRLDRRHHAIDAAVIAFTSDYVAETLAVRSNLKQSQAHRQEAPQWREFTGKDAEHRAAWRVWCQKMEKLSALLTEDLRDDRVVVMSNVRLRLGNGSAHEETIGKLSKVKLGSQLSVSDIDKASSEALWCALTREPDFDPKDGLPANPERHIRVNGTHVYAGDNIGLFPVSAGSIALRGGYAELGSSFHHARVYKITSGKKPAFAMLRVYTIDLLPYRNQDLFSVELKPQTMSMRQAEKKLRDALATGNAEYLGWLVVDDELVVDTSKIATDQVKAVEAELGTIRRWRVDGFFGDTRLRLRPLQMSKEGIKKESAPELSKIIDRPGWLPAVNKLFSEGNVTVVRRDSLGRVRLESTAHLPVTWKVQ

SEQ ID NO: 395 - protein, 1084 aa, Corynebacterium diphtheriae
MKYHVGIDVGTFSVGLAAIEVDDAGMPIKTLSLVSHIHDSGLDPDKIKSAVTRLASSGIARRTRRLYRRKRRRLQQLDKFIQRQGWPVIELEDYSDPLYPWKVRAELAASYIADEKERGEKLSVALRHIARHRGWRNPYAKVSSLYLPDEPSDAFKAIREEIKRASGQPVPETATVGQMVTLCELGTLKLRGEGGVLSARLQQSDHAREIQEICRMQEIGQELYRKIIDVVFAAESPKGSASSRVGKDPLQPGKNRALKASDAFQRYRIAALIGNLRVRVDGEKRILSVEEKNLVFDHLVNLAPKKEPEWVTIAEILGIDRGQLIGTATMTDDGERAGARPPTHDTNRSIVNSRIAPLVDWWKTASALEQHAMVKALSNAEVDDFDSPEGAKVQAFFADLDDDVHAKLDSLHLPVGRAAYSEDTLVRLTRRMLADGVDLYTARLQEFGIEPSWTPPAPRIGEPVGNPAVDRVLKTVSRWLESATKTWGAPERVIIEHVREGFVTEKRAREMDGDMRRRAARNAKLFQEMQEKLNVQGKPSRADLWRYQSVQRQNCQCAYCGSPITFSNSEMDHIVPRAGQGSTNTRENLVAVCHRCNQSKGNTPFAIWAKNTSIEGVSVKEAVERTRHWVTDTGMRSTDFKKFTKAVVERFQRATMDEEIDARSMESVAWMANELRSRVAQHFASHGTTVRVYRGSLTAEARRASGISGKLEFLDGVGKSRLDRRHHAIDAAVIAFTSDYVAETLAVRSNLKQSQAHRQEAPQWREFTGKDAEHRAAWRVWCQKMEKLSALLTEDLRDDRVVVMSNVRLRLGNGSAHEETIGKLSKVKLGSQLSVSDIDKASSEALWCALTREPDFDPKDGLPANPERHIRVNGTHVYAGDNIGLFPVSAGSIALRGGYAELGSSFHHARVYKITSGKKPAFAMLRVYTIDLLPYRNQDLFSVELKPQTMSMRQAEKKLRDALATGNAEYLGWLVVDDELVVDTSKIATDQVKAVEAELGTIRRWRVDGFFGDTRLRLRPLQMSKEGIKKESAPELSKIIDRPGWLPAVNKLFSEGNVTVVRRDSLGRVRLESTAHLPVTWKVQ

SEQ ID NO: 396 - protein, 1084 aa, Corynebacterium diphtheriae
MKYHVGIDVGTFSVGLAAIEVDDAGMPIKTLSLVSHIHDSGLDPDKMKSAVTRLASSGIARRTRRLYRRKRRRLQQLDKFIQRQGWPVIELEDYSDPLYPWKVRAELAASYIADEKERGEKLSVALRHIARHRGWRNPYAKVSSLYLPDEPSDAFKSIREEIKRASGQPVPETATVGQMVTLCELGTLKLRGEGGVLSARLQQSDHAREIQEICRMQEIGQELYRKIIDVVFAAESPKGSASSRVGKDPLQPGKNRALKASDSFQRYRIAALISNLRVRVDGEKRILSVEEKNLVFDHLVNLAPKKEPEWVTIAEILGIDRGQLIGTATMTDDGERAGARPPTHDTNRSIVNSRIAPLVDWWKTASALEQHAMVKALSNAEVDDFDSPEGAKVQAFFADLDDDVHAKLDSLHLPVGRAAYSEDTLVRLTRRMLADGVDLYTARLQEFGIEPSWTPPAPRIGEPVGNPAVDRVLKTVSRWLESATKTWGAPERVIIEHVRDGFVTEKRAREMDGDMRRRAARNAKLFQEMQEKLNVQGKPSRADLWRYQSVQRQNCQCAYCGSPITFSNSEMDHIVPRAGQGSTNTRENLVAVCHRCNQSKGNTPFAIWAKNTSIEGVSVKEAVERTRHWVTDTGMRSTDFKKFTKAVVERFQRATMDEEIDARSMESVAWMANELRSRVAQHFASHGTTVRVYRGSLTAEARRASGISGKLEFLDGVGKSRLDRRHHAIDAAVIAFTSDYVAETLAVRSNLKQSQAHRQEAPQWREFTGKDAEHRAAWRVWCQKMEKLSALLTEDLRDDRVVVMSNVRLRLGNGSAHEETIGKLSKVKLGSQLSVSDIDKASSEALWCALTREPDFDPKDGLPANPERHIRVNGTHVYAGDNIGLFPVSAGSIALRGGYAELGSSFHHARVYKITSGKKPAFAMLRVYTIDLLPYRNQDLFSVELKPQTMSMRQAEKKLRDALATGNAEYLGWLVVDDELVVDTSKIATDQVKAVEAELGTIRRWRVDGFFGDTRLRLRPLQMSKEGIKKELAPELSKIIDRPGWLPAVNKLFSEGNVTVVRRDSLGRVRLESTAHLPVTWKVQ

SEQ ID NO: 397 - protein, 1084 aa, Corynebacterium diphtheriae
MKYHVGIDVGTFSVGLAAIEVDDAGMPIKTLSLVSHIHDSGLDPDKMKSAVTRLASSGIARRTRRLYRRKRRRLQQLDKFIQRQGWPVIELEDYSDPLYPWKVRAELAASYIADEKERGEKLSVALRHIARHRGWRNPYAKVSSLYLPDEPSDAFKSIREEIKRASGQPVPETATVGQMVTLCELGTLKLRGEGGVLSARLQQSDHAREIQEICRMQEIGQELYRKIIDVVFAAESPKGSASSRVGKDPLQPGKNRALKASDAFQRYRIAALIGNLRVRVDGEKRILSVEEKNLVFDHLVNLAPKKEPEWVTIAEILGIDRGQLIGTATMTDDGERAGARPPTHDTNRSIVNSRIAPLVDWWKTASALEQHAMVKALSNAEVDDFDSPEGAKVQAFFADLDDDVHAKLDSLHLPVGRAAYSEDTLVRLTRRMLADGVDLYTARLQEFGIEPSWTPPAPRIGEPVGNPAVDRVLKTVSRWLESATKTWGAPERVIIEHVREGFVTEKRAREMDGDMRRRAARNAKLFQEMQEKLNVQGKPSRADLWRYQSVQRQNCQCAYCGSPITFSNSEMDHIVPRAGQGSTNTRENLVAVCHRCNQSKGNTPFAIWAKNTSIEGVSVKEAVERTRHWVTDTGMRSTDFKKFTKAVVERFQRATMDEEIDARSMESVAWMANELRSRVAQHFASHGTTVRVYRGSLTAEARRASGISGKLEFLDGVGKSRLDRRHHAIDAAVIAFTSDYVAETLAVRSNLKQSQAHRQEAPQWREFTGKDAEHRAAWRVWCQKMEKLSALLTEDLRDDRVVVMSNVRLRLGNGSAHEETIGKLSKVKLGSQLSVSDIDKASSEALWCALTREPDFDPKDGLPANPERHIRVNGTHVYAGDNIGLFPVSAGSIALRGGYAELGSSFHHARVYKITSGKKPAFAMLRVYTIDLLPYRNQDLFSVELKPQTMSMRQAEKKLRDALATGNAEYLGWLVVDDELVVDTSKIATDQVKAVEAELGTIRRWRVDGFFGDTRLRLRPLQMSKEGIKKESAPELSKIIDRPGWLPAVNKLFSEGNVTVVRRDSLGRVRLESTAHLPVTWKVQ

SEQ ID NO: 398 - protein, 1084 aa, Corynebacterium diphtheriae
MKYHVGIDVGTFSVGLAAIEVDDAGMPIKTLSLVSHIHDSRLDPDKIKSAVTRLASSGIARRTRRLYRRKRRRLQQLDKFIQRQGWPVIELEDYSDPLYPWKVRAELAASYIADEKERGEKLSVALRHIARHRGWRNPYAKVSSLYLPDEPSDAFKAIREEIKRASGQPVPETATVGQMVTLCELGTLKLRGEGGVLSARLQQSDHAREIQEICRMQEIGQELYRKIIDVVFAAESPKGSASSRVGKDPLQPGKNRALKASDAFQRYRIAALIGNLRVRVDGEKRILSVEEKNLVFDHLVNLAPKKEPEWVTIAEILGIDRGQLIGTATMTDDGERAGARPPTHDTNRSIVNSRIAPLVDWWKTASALEQHAMVKALSNAEVDDFDSPEGAKVQAFFADLDDDVHAKLDSLHLPVGRAAYSEDTLVRLTRRMLADGVDLYTARLQEFGIEPSWTPPAPRIGEPVGNPAVDRVLKTVSRWLESATKTWGAPERVIIEHVREGFVTEKRAREMDGDMRRRAARNAKLFQEMQEKLNIQGKPSRADLWRYQSVQRQNCQCAYCGSPITFSNSEMDHIVPRAGQGSTNTRENLVAVCHRCNQSKGNTPFAIWAKNTSIEGVSVKEAVERTRHWVTDTGMRSTDFKKFTKAVVERFQRVTMDEEIDARSMESVAWMANELRSRVAQHFASRGTTVRVYRGSLTAEARRASGISGKLEFLDGVGKSRLDRRHHAIDAAVIAFTSDYVAETLAVRSNLKQSQAHRQEAPQWREFTGKDAEHRAAWRVWCQKMEKLSALLTEDLRDDRVVVMSNVRLRLGNGSAHEETIGKLSKVKLGSQLSVSDIDKASSEALWCALTREPDFDPKDGLPANPERHIRVNGTHVYAGDNIGLFPVSAGSIALRGGYAELGSSFHHARVYKITSGKKPAFAMLRVYTIDLLPYRNQDLFSVELKPQTMSMRQAEKKLRDALATGNAEYLGWLVVDDELVVDTSKIATDQVKAVEAELGTIRRWRVDGFFGDTRLRLRPLQMSKEGIKKESAPELSKIIDRPGWLPAVNKLFSEGNVTVVRRDSLGRVRLESTAHLPVTWKVQ

SEQ ID NO: 399 - protein, 1069 aa, Corynebacterium matruchotii
MAAIAIDDDGKPTEILSAISLIHDSGVDPDSAKSAATRLATSGIARRTRRLYRRKRKRLAKLDKFISSQGWPLKEFEKYEDPFYPWRVRAELATTAITDQQELGEKLSIALRHIARHRGWRNPYSKVTALYTVTEPSDAFLAMQEECAKQLGRTIPETITVGQLVTGMNLGKTRLRGENSLLAARPRQSDNANEIHTIAKVQGLSNELVRQIIDHVFAAESPKGSAAEQVGKDPLQPTKKRALKASDAFQQYRIAALIGNLRIRGGKGNRRLTTEETRLVFDYLRSLPAKQEPTWQLVAEQLKIDRGNLVGTAIMTDDGERAGAKPPVHDTNRIMENTKIKPLATWWKSADADARAAMVKALSNAEVDDFDSQAGAQVQEFFFGISDEDQEKLDGLHLPIGRAAYSEDTLDRLTKRMIGEGMDLYEARQAEFKISNDWAPPAPEIGERVGNPAVDRVLKATARWLNAAERQWGAPKSVNIEHVRAAFMSESSARELDRDNQQRAKRNVKVVAEMQEKLGIEGRPSRADVWRFQSIQRQNGKCAYCGAEISFKNSEMDHIIPQVGEGSTNTRDNLVAVCRECNSSKSNIAFAVWAENTSRPGVSVQKAIERTHHWVTDSGLRKPEFDKFRKQVCDRLRRKATDEPIDARSLESVAWMANELRSRIAQKFKDGDTKVRVYKGALTAEARRASGISGKLEFVDGKGKSRLDRRHHAVDAAVVAFTSNYVAETLALRSNMKFDQELRRKAPQWREFTGSDHVHQVEWTKWKYRMQALAELLNNALVQDRIVVMHNLRLRLGNGAAHEDTIGKLTRLKVGDAISTTDIDRASSEALWCALTRDPDYDPKTGLPENPNRTIRIHGTHLTASDEITVFPVAAASIPIRDGFAKLGSNYHHVRLFRVPSGKKYKYCLMQVYTVDLLKFRKEDLFTVELKPQTISVRTCEALLRKALANGTAEYLGWLVSDDELLIDTSSFDTPGIVKLREEYGPVNRWRLAGLTSVTRLNLRPLYLSKEGLKPNVNPEIKKIIDNRSWIITVNKLFSSGHVKIIRRDALGRPRLHSAAHLPICWEVK

SEQ ID NO: 400 - protein, 210 aa, Diplosphaera colitermitum
MSDILDKPIVLSLNRAWQVIGHRTVKQALVALNGGNADLPPALGLDIAYPKFDDGAWNFDRPLFLNPLPWSEWIELPVRDFDFAITTPRLRIRVPTVIVATQFAKMPVRIPRLTREAIFERDGGVCQYTGEHVGKHGGNLDHVVPRDRGGRDSFENLVWAKREINSLKANRLPHEAGLRLLRRPKAPAPLPASMTIREARHPDWRHFLTP

SEQ ID NO: 401 - protein, 1332 aa, Dolosigranulum pigrum
MQKNYTIGLDIGTNSVGWAVMKDDYTLIRKRMKVLGNTDIKKIKKNFWGVRLFDEGETAKETRLKRGTRRRYQRRRNRLIYLQDIFQQPMLAIDENFFHRLDDSFFVPDDKSYDRHPIFGSLEEEVAYHNTYPTIYHLRKHLADNPEKADLRLVYTALAHIVKYRGHFLIEGELNTENTSISETFEQFLDTYSDIFKEQLVGDISKVEEILSSKQSRSRKHEQIMALFPNENKLGNFGRFMMLIVGNTSNFKPVFDLDDEYKLKLSDETYEEDLDTLLGMTDDVFLDVFMAAKNVYDAVEMSAIISTDTGNSKAVLSNQMINFYDEHKVDLAQLKQFFKTHLPDKYYECFSDPSKNGYAGYIDGKTNQEDFYKYIEKVMKTIKSDKKDYFLDKIDREVFLRKQRSFYNSVIPHQIHLQEMQAILDRQSQYYPFLAENRDKIESLVTFRIPYYVGPLTVSDQSEFAWMERQSDEPIRPWNFDEIVNKERSAEKFIERMTNMDTYLLEEKVLPKRSLLYQTFEVYNELTKVRYTNEQGKTEKLNRQQKAEIIETLFKQKNRVREKDIANYLEQYGYVDGTDIKGVEDKFNASLSTYNDLAKIDGAKAYLDDPEYADVWEDIIKILTIFEDKAMRKKQLQTYSDTLSPEILKKLERKHYTGWGRFSKKLINGLRDEGSNKTILDYLKSDEGSSGPTNRNFMQLIRDNTLSFKKKIEDAQTIEDTTHIYDTVAELPGSPAIKKGIRQALKIVEEIIDIIGYEPENIVVEMARESQTTKKGKDLSKERLEKLTEAIKEFDGPSDVKVKDLKNENLRNDRLYLYYLQNGRDMYTNEPLDINNLSKYDIDHIIPQSFTTDNSIDNKVLVSRTKNQGNKSDDVPSINIVHKMKPFWRQLHKAGLISDRKFKNLTKAEHGGLTEADRAHFLNRQLVETRQITKHVANLLDSQYNTAEEQRINIVLLKSSMTSRFRKEFKLYKVREINDYHHGHDAYLNAVVATTIMKVYPNLKPQFVYGQYKKTSMFKEEKATARKHFYSNITKFFKKEKVVNEETGEILWDTERHLSTIKRVLSWKQMNIVKKVEKQKGQLWKETIYPKGDSSKLIPVKEGMDPQKYGGLSQVSEAFAVVITHEKGKKKQLKSDLISIPIVDQKAYEQHPTAYLEEAGYNNPTVLHELFKYQLFELEDGSRRMIASAKEFQKGNQMVLPLELVELLYHANRYDKVKFPDSIEYVHDNLAKFDDLLEYVIDFSNKYINADKNVQKIQKIYKEHGTEDVELTVESFVNLMTFTAMGAPATFKFYGESITRSRYTSITEFRGSTLIFQSITGLYETRYKLEDN

SEQ ID NO: 402 - protein, 921 aa, Enterococcus faecalis
MIPHQIHLAELQAIIHRQAAYYPFLKENQEKIEQLVTFRIPYYVGPLSKGDASTFAWLKRQSEEPIRPWNLQETVDLDQSATAFIERMTNFDTYLPSEKVLPKHSLLYEKFMVFNELTKISYTDDRGIKANFSGKEKEKIFDYLFKTRRKVKKKDIIQFYRNEYNTEIVTLSGLEEDQFNASFSTYQDLLKCGLTRAELDHPDNAEKLEDIIKILTIFEDRQRIRTQLSTFKGQFSAEVLKKLERKHYTGWGRLSKKLINGIYDKESGKTILGYLIKDDGVSKHYNRNFMQLINDSQLSFKNAIQKAQSSEHEETLSETVNELAGSPAIKKGIYQSLKIVDELVAIMGYAPKRIVVEMARENQTTSTGKRRSIQRLKIVEKAMAEIGSNLLKEQPTTNEQLRDTRLFLYYMQNGKDMYTGDELSLHRLSHYDIDHIIPQSFMKDDSLDNLVLVGSTENRGKSDDVPSKEVVKDMKAYWEKLYAAGLISQRKFQRLTKGEQGGLTLEDKAHFIQRQLVETRQITKNVAGILDQRYNANSKEKKVQIITLKASLTSQFRSIFGLYKVREVNDYHHGQDAYLNCVVATTLLKVYPNLAPEFVYGEYPKFQTFKENKATAKAIIYTNLLRFFTEDEPRFTKDGEILWSNSYLKTIKKELNYHQMNIVKKVEVQKGGFSKESIKPKGPSNKLIPVKNGLDPQKYGGFDSPIVAYTVLFTHEKGKKPLIKQEILGITIMEKTRFEQNRILFLEEKGFLRPRVLMKLPKYTLYEFPEGRRRLLASAKEAQKGNQMVLPEHLLTLLYHAKQCLLPNQSESLTYVEQHQPEFQEILERVVDFAEVHTLAKSKVQQIVKLFEANQTADVKEIAASFIQLMQFNAMGAPSTFKFFQKDIERARYTSIKEIFDATIIYQSTTGLYETRRKVVD

SEQ ID NO: 403 - protein, 1337 aa, Enterococcus faecalis; identical to SEQ ID NO: 115

SEQ ID NO: 404 - protein, 1337 aa, Enterococcus faecalis
MKKDYVIGLDIGTNSVGWAVMTEDYQLVKKKMPIYGNTEKKKIKKNFWGVRLFEEGHTAEDRRLKRTARRRISRRRNRLRYLQAFFEEAMTALDENFFARLQESFLVPEDKKWHRHPIFAKLEDEVAYHETYPTIYHLRKKLADSSEQADLRLIYLALAHIVKYRGHFLIEGKLSTENISVKEQFQQFMIIYNQTFVNGESRLVSAPLPESVLIEEELTEKASRTKKSEKVLQQFPQEKANGLFGQFLKLMVGNKADFKKVFGLEEEAKITYASESYEEDLEGILAKVGDEYSDVFLAAKNVYDAVELSTILADSDKKSHAKLSSSMIVRFTEHQEDLKNFKRFIRENCPDEYDNLFKNEQKDGYAGYITHAGKVSQLKFYQYVKKIIQDIAGAEYFLEKIAQENFLRKQRTFDNGVIPHQIHLAELQAIIHRQAAYYPFLKENQEKIEQLVTFRIPYYVGPLSKGDANTFAWLKRQSEEPIRPWNLQETVDLDQSATAFIERMTNFDTYLPSEKVLPKHSLLYEKFMVFNELTKISYTDDRGIKANFSGKEKEKIFDYLFKTRRKVKKKDIIQFYRNEYNTEIVTLSGLEEDQFNASFSTYQDLLKCGLTRAELDHPDNAEKLEDIIKILTIFEDRQRIRTQLSTFKGQFSAEVLKKLERKHYTGWGRLSKKLINGIYDKESGKTILDYLIKDDGVSKHYNRNFMQLINDSQLSFKNAIQKAQSSEHEETLSETVNELAGSPAIKKGIYQSLKIVDELVAIMGYAPKRIVVEMARENQTTSTGKRRSIQRLKIVEKAMAEIGSNLLKEQPTTNEQLRDTRLFLYYMQNGKDMYTGDELSLHRLSHYDIDHIIPQSFMKDDSLDNLVLVGSTENRGKSDDVPSKEVVKDMKAYWEKLYAAGLISQRKFQRLTKGEQGGLTLEDKAHFIQRQLVETRQITKNVAGILDQRYNAKSKEKKVQIITLKASLTSQFRSIFGLYKVREVNDYHHGQDAYLNCVVATTLLKVYPNLAPEFVYGEYPKFQTFKENKATAKAIIYTNLLRFFTEDEPRFTKDGEILWSNSYLKTIKKELNYHQMNIVKKVEVQKGGFSKESIKPKGPSNKLIPVKNGLDPQKYGGFDSPIVAYTVLFTHEKGKKPLIKQEILGITIMEKTRFEQNPILFLEEKGFLRPRVLMKLPKYTLYQFPEGRRRLLASAKEAQKGNQMVLPEHLLTLLYHAKQCLLPNQSESLAYVEQHQPEFQEILERVVDFAEVHTLAKSKVQQIVKLFEANQTADVKEIAASFIQLMQFNAMGAPSTFKFFQKDIERARYTSIKEIFDATIIYQSTTGLYETRRKVVD

SEQ ID NO: 405 - protein, 1337 aa, Enterococcus faecalis
MKKDYVIGLDIGTNSVGWAVMTEDYQLVKKKMPIYGNTEKKKIKKNFWGVRLFEEGHTAEDRRLKRTARRRISRRRNRLRYLQAFFEEAMTALDENFFARLQESFLVPEDKKWHRHPIFAKLEDEVAYHETYPTIYHLRKKLADSSEQADLRLIYLALAHIVKYRGHFLIEGKLSTENISVKEQFQQFMIIYNQTFVNGESRLVSTPLPESVLIEEELTEKASRTKKSEKVLQQFPQEKANGLFGQFLKLMVGNKADFKKVFGLEEEAKITYASESYEEDLEGILAKVGDEYSDVFLAAKNVYDAVELSTILADSDKKSHAKLSSSMIVRFTEHQEDLKNFKRFIRENCPDEYDNLFKNEQKDGYAGYITHAGKVSQLKFYQYVKKIIQDIAGAEYFLEKIAQENFLRKQRTFDNGVIPHQIHLAELQAIIHRQAAYYPFLKENQEKIEQLVTFRIPYYVGPLSKGDASTFAWLKRQSEEPIRPWNLQETVDLDQSATAFIERMTNFDTYLPSEKVLPKHSLLYEKFMVFNELTKISYTDDRGIKANFSGKEKEKIFDYLFKTRRKVKKKDIIQFYRNEYNTEIVTLSGLEEDQFNASFSTYQDLLKCGLTRAELDHPDNAEKLEDIIKILTIFEDRQRIRTQLSTFKGQFSAEVLKKLERKHYTGWGRLSKKLINGIYDKESGKTILDYLVKDDGVSKHYNRNFMQLINDSQLSFKNAIQKAQSSEHEETLSETVNELAGSPAIKKGIYQSLKIVDELVAIMGYAPKRIVVEMARENQTTSTGKRRSIQRLKIVEKAMAEIGSNLLKEQPTTNEQLRDTRLFLYYMQNGKDMYTGDELSLHRLSHYDIDHIIPQSFMKDDSLDNLVLVGSTENRGKSDDVPSKEVVKDMKAYWEKLYAAGLISQRKFQRLTKGEQGGLTLEDKAHFIQRQLVETRQITKNVAGILDQRYNAKSKEKKVQIITLKASLTSQFRSIFGLYKVREVNDYHHGQDAYLNCVVATTLLKVYPNLAPEFVYGEYPKFQTFKENKATAKAIIYTNLLRFFTEDEPRFTKDGEILWSNSYLKTIKKELNYHQMNIVKKVEVQKGGFSKESIKPKGPSNKLIPVKNGLDPQKYGGFDSPIVAYTVLFTHEKGKKPLIKQEILGITIMEKTRFEQNPILFLEEKGFLRPRVLMKLPKYTLYEFPEGRRRLLASAKEAQKGNQMVLPEHLLTLLYHAKQCLLPNQSESLAYVEQHQPEFQEILERVVDFAEVHTLAKSKVQQIVKLFEANQTADVKEIAASFIQLMQFNAMGAPSTFKFFQKDIERARYTSIKEIFDATIIYQSTTGLYETRRKVVD

SEQ ID NO: 406 - protein, 1337 aa, Enterococcus faecalis
MKKDYVIGLDIGTNSVGWAVMTEDYQLVKKKMPIYGNTEKKKIKKNFWGVRLFEEGHTAEDRRLKRTARRRISRRRNRLRYLQAFFEEAMTDLDENFFARLQESFLVPEDKKWHRHPIFAKLEDEVAYHETYPTIYHLRKKLADSSEQADLRLIYLALAHIVKYRGHFLIEGKLSTENISVKEQFQQFMIIYNQTFVNGESRLVSAPLPESVLIEEELTEKASRTKKSEKVLQQFPQEKANGLFGQFLKLMVGNKADFKKVFGLEEEAKITYASESYEEDLEGILAKVGDEYSDVFLAAKNVYDAVELSTILADSDKKSHAKLSSSMIVRFTEHQEDLKKFKRFIRENCPDEYDNLFKNEQKDGYAGYIAHAGKVSQLKFYQYVKKIIQDIAGAEYFLEKIAQENFLRKQRTFDNGVIPHQIHLAELQAIIHRQAAYYPFLKENQEKIEQLVTFRIPYYVGPLSKGDASTFAWLKRQSEEPIRPWNLQETVDLDQSATAFIERMTNFDTYLPSEKVLPKHSLLYEKFMVFNELTKISYTDDRGIKANFSGKEKEKIFDYLFKTRRKVKKKDIIQFYRNEYNTEIVTLSGLEEDQFNASFSTYQDLLKCGLTRAELDHPDNAEKLEDIIKILTIFEDRQRIRTQLSTFKGQFSAEVLKKLERKHYTGWGRLSKKLINGIYDKESGKTILGYLIKDDGVSKHYNRNFMQLINDSQLSFKNAIQKAQSSEHEETLSETVNELAGSPAIKKGIYQSLKIVDELVAIMGYAPKRIVVEMARENQTTSTGKRRSIQRLKIVEKAMAEIGSNLLKEQPTTNEQLRDTRLFLYYMQNGKDMYTGDELSLHRLSHYDIDHIIPQSFMKDDSLDNLVLVGSTENRGKSDDVPSKEVVKDMKAYWEKLYAAGLISQRKFQRLTKGEQGGLTLEDKAHFIQRQLVETRQITKNVAGILDQRYNANSKEKKVQIITLKASLTSQFRSIFGLYKVREVNDYHHGQDAYLNCVVATTLLKVYPNLAPEFVYGEYPKFQTFKENKATAKAIIYTNLLRFFTEDEPRFTKDGEILWSNSYLKTIKKELNYHQMNIVKKVEVQKGGFSKESIKPKGPSNKLIPVKNGLDPQKYGGFDSPIVAYTVLFTHEKGKKPLIKQEILGITIMEKTRFEQNPILFLEEKGFLRPRVLMKLPKYTLYEFPEGRRRLLASAKEAQKGNQMVLPEHLLTLLYHAKQCLLPNQSESLAYVEQHQPEFQEILERVVDFAEVHTLAKSKVQQIVKLFEANQTADVKEIAASFIQLMQFNAMGAPSTFKFFQKDIERARYTSIKEIFDATIIYQSTTGLYETRRKVVD

SEQ ID NO: 407 - protein, 936 aa, Enterococcus faecalis
MKKDYVIGLDIGTNSVGWAVMTEDYQLVKKKMPIYGNTEKKKIKKNFWGVRLFEEGHTAEDRRLKRTARRRISRRRNRLRYLQAFFEEAMTDLDENFFARLQESFLVPEDKKWHRHPIFAKLEDEVAYHETYPTIYHLRKKLADSSEQADLRLIYLALAHIVKYRGHFLIEGKLSTENISVKEQFQQFMIIYNQTFVNGESRLVSAPLPESVLIEEELTEKASRTKKSEKVLQQFPQEKANGLFGQFLKLMVGNKADFKKVFGLEEEAKITYASESYEEDLEGILAKVGDEYSDVFLAAKNVYDAVELSTILADSDKKSHAKLSSSMIVRFTEHQEDLKKFKRFIRENCPDEYDNLFKNEQKDGYAGYIAHAGKVSQLKFYQYVKKIIQDIAGAEYFLEKIAQENFLRKQRTFDNGVIPHQIHLAELQAIIHRQAAYYPFLKENQEKIEQLVTFRIPYYVGPLSKGDASTFAWLKRQSEEPIRPWNLQETVDLDQSATAFIERMTNFDTYLPSEKVLPKHSLLYEKFMVFNELTKISYTDDRGIKANFSGKEKEKIFDYLFKTRRKVKKKDIIQFYRNEYNTEIVTLSGLEEDQFNASFSTYQDLLKCGLTRAELDHPDNAEKLEDIIKILTIFEDRQRIRTQLSTFKGQFSAEVLKKLERKHYTGWGRLSKKLINGIYDKESGKTILGYLIKDDGVSKHYNRNFMQLINDSQLSFKNAIQKAQSSEHEETLSETVNELAGSPAIKKGIYQSLKIVDELVAIMGYAPKRIVVEMARENQTTSTGKRRSIQRLKIVEKAMAEIGSNLLKEQPTTNEQLRDTRLFLYYMQNGKDMYTGDELSLHRLSHYDIDHIIPQSFMKDDSLDNLVLVGSTENRGKSDDVPSKEVVKDMKAYWEKLYAAGLISQRKFQRLTKGEQGGLTLEDKAHFIQRQLVETR

SEQ ID NO: 408 - protein, 1337 aa, Enterococcus faecalis
MKKDYVIGLDIGTNSVGWAVMTEDYQLVKKKMPIYGNTEKKKIKKNFWGVRLFEEGHTAEDRRLKRTARRRISRRRNRLRYLQAFFEEAMTDLDENFFARLQESFLVPEDKKWHRHPIFAKLEDEVAYHETYPTIYHLRKKLADSSEQADLRLIYLALAHIVKYRGHFLIEGKLSTENISVKEQFQQFMIIYNQTFVNGESRLVSAPLPESVLIEEELTEKASRTKKSEKVLQQFPQEKANGLFGQFLKLMVGNKADFKKVFGLEEEAKITYASESYEEDLEGILAKVGDEYSDVFLAAKNVYDAVELSTILADSDKKSHAKLSSSMIVRFTEHQEDLKKFKRFIRENCPDEYDNLFKNEQKDGYAGYIAHAGKVSQLKFYQYVKKIIQDIAGAEYFLEKIAQENFLRKQRTFDNGVIPHQIHLAELQAIIHRQAAYYPFLKENQEKIEQLVTFRIPYYVGPLSKGDASTFAWLKRQSEEPIRPWNLQETVDLDQSATAFIERMTNFDTYLPSEKVLPKHSLLYEKFMVFNELTKISYTDDRGIKANFSGKEKEKIFDYLFKTRRKVKKKDIIQFYRNEYNTEIVTLSGLEEDQFNASFSTYQDLLKCGLTRAELDHPDNAEKLEDIIKILTIFEDRQRIRTQLSTFKGQFSAEVLKKLERKHYTGWGRLSKKLINGIYDKESGKTILDYLVKDDGVSKHYNRNFMQLINDSQLSFKNAIQKAQSSEHEETLSETVNELAGSPAIKKGIYQSLKIVDELVAIMGYAPKRIVVEMARENQTTSTGKRRSIQRLKIVEKAMAEIGSNLLKEQPTTNEQLRDTRLFLYYMQNGKDMYTGDELSLHRLSHYDIDHIIPQSFMKDDSLDNLVLVGSTENRGKSDDVPSKEVVKDMKAYWEKLYAAGLISQRKFQRLTKGEQGGLTLEDKAHFIQRQLVETRQITKNVAGILNQRYNANSKEKKVQIITLKASLTSQFRSIFGLYKVREVNDYHHGQDAYLNCVVATTLLKVYPNLAPEFVYGEYPKFQTFKENKATAKAIIYTNLLRFFTEDEPRFTKDGEILWSNSYLKTIKKELNYHQMNIVKKVEVQKGGFSKESIKPKGPSNKLIPVKNGLDPQKYGGFDSPVVAYTVLFTHEKGKKPLIKQEILGITIMEKTRFEQNPILFLEEKGFLRPRVLMKLPKYTLYEFPEGRRRLLASAKEAQKGNQMVLPEHLLTLLYHAKQCLLPNQSESLAYVEQHQPEFQEILERVVDFAEVHTLAKSKVQQIVKLFEANQTADVKEIAASFIQLMQFNAMGAPSTFKFFQKDIERARYTSIKEIFDATIIYQSTTGLYETRRKVVD

SEQ ID NO: 409 - protein, 1337 aa, Enterococcus faecalis
MKKDYVIGLDIGTNSVGWAVMTEDYQLVKKKMPIYGNTEKKKIKKNFWGVRLFEEGHTAEDRRLKRTARRRISRRRNRLRYLQAFFEEAMTDLDENFFARLQESFLVPEDKKWHRHPIFAKLEDEVAYHETYPTIYHLRKKLADSSEQADLRLIYLALAHIVKYRGHFLIEGKLSTENISVKEQFQQFMIIYNQTFVNGESRLVSAPLPESVLIEEELTEKASRTKKSEKVLQQFPQEKANGLFGQFLKLMVGNKADFKKVFGLEEEAKITYASESYEEDLEGILAKVGDEYSDVFLAAKNVYDAVELSTILADSDKKSHAKLSSSMIVRFTEHQEDLKKFKRFIRENCPDEYDNLFKNEQKDGYAGYIAHAGKVSQLKFYQYVKKIIQDIAGAEYFLEKIAQENFLRKQRTFDNGVIPHQIHLAELQAIIHRQAAYYPFLKENQEKIEQLVTFRIPYYVGPLSKGDASTFAWLKRQSEEPIRPWNLQETVDLDQSATAFIERMTNFDTYLPSEKVLPKHSLLYEKFMVFNELTKISYTDDRGIKANFSGKEKEKIFDYLFKTRRKVKKKDIIQFYRNEYNTEIVTLSGLEEDQFNASFSTYQDLLKCGLTRAELDHPDNAEKLEDIIKILTIFEDRQRIRTQLSTFKGQFSAEVLKKLERKHYTGWGRLSKKLINGIYDKESGKTILGYLIKDDGVSKHYNRNFMQLINDSQLSFKNAIQKAQSSEHEETLSETVNELAGSPAIKKGIYQSLKIVDELVAIMGYAPKRIVVEMARENQTTSTGKRRSIQRLKIVEKAMAEIGSNLLKEQPTTNEQLRDTRLFLYYMQNGKDMYTGDELSLHRLSHYDIDHIIPQSFMKDDSLDNLVLVGSTENLGKSDDVPSKEVVKDMKAYWEKLYAAGLISQRKFQRLTKGEQGGLTLEDKAHFIQRQLVETRQITKNVAGILDQRYNANSKEKKVQIITLKASLTSQFRSIFGLYKVREVNDYHHGQDAYLNCVVATTLLKVYPNLAPEFVYGEYPKFQTFKENKATAKAIIYTNLLRFFTEDEPRFTKDGEILWSNSYLKTIKKELNYHQMNIVKKVEVQKGGFSKESIKPKGPSNKLIPVKNGLDPQKYGGFDSPIVAYTVLFTHEKGKKPLIKQEILGITIMEKTRFEQNPILFLEEKGFLRPRVLMKLPKYTLYEFPEGRRRLLASAKEAQKGNQMVLPEHLLTLLYHAKQCLLPNQSESLAYVEQHQPEFQEILERVVDFAEVHTLAKSKVQQIVKLFEANQTADVKEIAASFIQLMQFNAMGAPSTFKFFQKDIERARYTSIKEIFDATIIYQSTTGLYETRRKVVD

SEQ ID NO: 410 - protein, 1337 aa, Enterococcus faecalis
MKKDYVIGLDIGTNSVGWAVMTEDYQLVKKKMPIYGNTEKKKIKKNFWGVRLFEEGHTAEDRRLKRTARRRISRRRNRLRYLQAFFEEAMTDLDENFFARLQESFLVPEDKKWHRHPIFAKLEDEVAYHETYPTIYHLRKKLADSSEQADLRLIYLALAHIVKYRGHFLIEGKLSTENTSVKEQFQQFMVIYNQTFVNGESRLVSAPLPESVLIEEELTEKASRTKKSEKVLQQFPQEKANGLFGQFLKLMVGNKADFKKVFGLEEEAKITYASESYEEDLEGILAKVGDEYSDVFLAAKNVYDAVELSTILADSDKKSHAKLSSSMIVRFTEHQEDLKKFKRFIRENCPDEYDNLFKNEQKDGYAGYIAHAGKVSQLKFYQYVKKIIQDIAGAEYFLEKIAQENFLRKQRTFDNGVIPHQIHLAELQAIIHRQAAYYPFLKENQEKIEQLVTFRIPYYVGPLSKGDASTFAWLKRQSEEPIRPWNLQETVDLDQSATAFIERMTNFDTYLPSEKVLPKHSLLYEKFMVFNELTKISYTDDRGIKANFSGKEKEKIFDYLFKTRRKVKKKDIIQFYRNEYNTEIVTLSGLEEDQFNASFSTYQDLLKCGLTRAELDHPDNAEKLEDIIKILTIFEDRQRIRTQLSTFKGQFSAEVLKKLERKHYTGWGRLSKKLINGIYDKESGKTILDYLVKDDGVSKHYNRNFMQLINDSQLSFKNAIQKAQSSEHEETLSETVNELAGSPAIKKGIYQSLKIVDELVAIMGYAPKRIVVEMARENQTTSTGKRRSIQRLKIVEKAMAEIGSNLLKEQPTTNEQLRDTRLFLYYMQNGKDMYTGDELSLHRLSHYDIDHIIPQSFMKDDSLDNLVLVGSTENRGKSDDVPSKKVVKKMKAYWEKLYAAGLISQRKFQRLTKGEQGGLTLEDKAHFIQRQLVETRQITKNVAGILDQRYNAKSKEKKVQIITLKASLTSQFRSIFGLYKVREVNDYHHGQDAYLNCVVATTLLKVYPNLAPEFVYGEYPKFQAFKENKATAKTIIYTNLMRFFTEDEPRFTKDSEILWSNSYLKTIKKELNYHQMNIVKKVEVQKGGFSKESIKPKGPSNKLIPVKNGLDPQKYGGFDSPVVAYTVLFTHEKGKKPLIKQEILGITIMEKTRFEQNPILFLEEKGFLRPRVLMKLPKYTLYEFPEGRRRLLASAKEAQKGNQMVLPEHLLTLLYHAKQCLLPNQSESLAYVEQHQPEFQEILERVVDFAEVHTLAKSKVQQIVKLFEANQTADVKEIAASFIQLMQFNAMGAPSTFKFFQKDIERARYTSIKEIFDATIIYQSTTGLYETRRKVVD

SEQ ID NO: 411 - protein, 1150 aa, Enterococcus faecalis
MYSIGLDLGISSVGWSVIDERTGNVIDLGVRLFSAKNSEKNLERRTNRGGRRLIRRKTNRLKDAKKILAAVGFYEDKSLKNSCPYQLRVKGLTEPLSKGEIYKVTLHILKKRGISYLDEDDTEAAKESQDYKEQVRENAQLLTKYTPGQIQLQRLKENNRVKTGINAQGNYQLNVFKVSAYANELATILKTQQAFYPNELTDDWIALFVQPGIAEEAGLIYRKRPYYHGPGNEANNSPYGRWSDFKKTGQPATNIFDKLIGKDFQGELRASGLSLSAQQYNLLNDLTNLKIDGEIPLSPEQKEYILAELMTKEFTRFGVNDVVKLLGVKKERLSGWRLDKKGKPEIHTLKGYRNWRKIFAESGIDLAMLPTETIDCLAKILTLNTEREGIENTLAFELPELAESVKLLVLDRYKELSQSVSTQAWHRFSLKTLHLLIPELMNATSEQNTLLEQFQLKSDVRKRYSEYKKLPTKDVLTEIYNPTVNKTVSQAFKVIDALLVKYGKEQIRYITIEMPRDDNEEDEKKRIKELHAKNSQRKNDSQSYFMQKSGWSQEKFQTTIQKNRRFLAKLLYYYEQDGICAYTGLSISPELLVSDSTEIDHIIPISISLDDSINNKVLVLSKANQVKGQQTPYDAWMDGSFKKINGKFSNWDDYQKWVESRHFSHKKENNLLETRNIFDSEQVEKFLARNLNDTRYASRLVLNTLQSFFANQETKVRVVNGSFTHTLRKKWGADLDKTRETHHHHAVDATLCAVTPFVKVSRYHYAVKEETGEKVMREIDFETGEIVDEMSYREFKKSKKYERKTYQVKWPNFREQLKPVNLHPRIKFSHQVDRKANRKLSDATIYSVREKTEVKTLKSGKQKITTDEYTIGKIKDIYTVDGWEAFKKKQDKLLMKDLDEKTYERLLSIAETTPDFQEVEEKNGKVKRVKRSPFAVYCEENDIPAIRKYAKKNNGPLIRSLKYYDGKLNKHINITKDSQGRPVEKTKNGRKVTLQSLKPYRYDIYQDLETKAYYTVQLYYSDLRFVEGKYGITEKEYMKKVAEQTKGQVVRFCFSLQKNDGLEIEWKDSQRYDVRFYNFQSANSINFKGLEQEMMPAENQFKQKPYNNGAINLNIAKYGKEGKKLRKFNTDILGKKHYLYYEKEPKNIIK

SEQ ID NO: 412 - protein, 1150 aa, Enterococcus faecalis
MYSIGLDLGISSVGWSVIDERTGNVIDLGVRLFSAKNSEKNLERRTNRGGRRLIRRKTNRLKDAKKILAAVGFYEDKSLKNSCPYQLRVKGLTEPLSKGEIYKVTLHILKKRGISYLDEDDTEAAKESQDYKEQVRKNAQLLTKYTPGQIQLQRLKENNRVKTGINAQGNYQLNVFKVSAYANELATILKTQQAFYPNELTDDWIALFVQPGIAEEAGLIYRKRPYYHGPGNEANNSPYGRWSDFKKTGQPATNIFDRLIGKDFQGELRASGLSLSAQQYNLLNDLTNLKIDGEIPLSPEQKEYILAELMTKEFTRFGVNDVAKLLGVKKERLSGWRLDKKGKPEIHTLKGYRNWRKIFAESGIDLATLPTETIDCLAKVLTLNTEHEGIENTLAFELPELAESVKLLVLDRYKELSQSVSTQAWHRFSLKTLHLLIPELMNATSEQNTLLEQFQLKSDVRKRYSEYKKLPTKDVLTEIYNPTVNKTVSQAFKVIDALLVKYGKEQIRYITIEMPRDDNEEDEKKRIKELHAKNSQRKNDSQSYFMQKSGWSQEKFQTTIQKNRRFLAKLLYYYEQDGICAYTGLSISPELLVSDSTEIDHIIPISISLDDSINNKVLVLSKANQVKGQQTPYDAWMDGSFKKINGKFSNWDDYQKWVESRHFSHKKENNLLETRNIFDSEQVEKFLARNLNDTRYASRLVLNTLQSFFANHETKVRVVNGSFTHTLRKKWGADLDKTRETHHHHAVDATLCAVTPFVKVSRYHYAVKEETGEKVMREIDFETGEIVDEMSYQEFKKSKKYERKTYQVKWPNFREQLKPVNLHPRIKFSHQVDRKANRKLSDATIYSVREKTEVKTLKSGKQKITTDEYTIGKIKDIYTVDGWEAFKKKQDKLLMKDLDEKTYERLLSIAETTPDFQEVEEKNGKVKRVKRSPFAVYCEENDIPAIQKYAKKNNGPLIRSLKYYDGKLNKHINITKDSQGRPVEKTKNGRKVTLQSLKPYRYDIYQDLETKAYYTVQLYYSDLRFVEGKYGITEKEYMKKVAEQTKGQVVRFCFSLQKNDGLEIEWKDSQRYDVRFYNFQSANSINFKGLEQEMMPAENQFKQKPYNNGAINLNIAKYGKEGKKLRKFNTDILGKKHYLYYEKEPKNIIK

SEQ ID NO: 413 - protein, 1150 aa, Enterococcus faecalis
MYSIGLDLGISSVGWSVIDERTGNVIDLGVRLFSAKNSEKNLERRTNRGGRRLIRRKTNRLKDAKKILAAVGFYEDKSLKNSCPYQLRVKGLTEPLSKGEIYKVTLHILKKRGISYLDEDDTEAAKESQDYKEQVRKNAQLLTKYTPGQIQLQRLKENNRVKTGINVQGNYQLNVFKVSAYANELATILKTQQAFYPNELTDDWIALFVQPGIAEEAGLIYRKRPYYHGPGNEANNSPYGRWSDFQKTGEPATNIFDKLIGKDFQGELRASGLSLSAQQYNLLNDLTNLKIDGEVPLSSEQKEYILTELMTKEFTRFGVNDVVKLLGVKKERLSGWRLDKKGKPEIHTLKGYRNWRKIFAEAGIDLATLPTETIDCLAKVLTLNTEREGIENTLAFELPELSESVKLLVLDRYKELSQSISTQSWHRFSLKTLHLLIPELMNATSEQNTLLEQFQLKSDVRKRYSEYKKLPTKDVLAEIYNPTVNKTVSQAFKVIDALLVKYGKEQIRYITIEMPRDDNEEDEKKRIKELHAKNSQRKNDSQSYFMQKSGWSQEKFQTTIQKNRRFLAKLLYYYEQDGICAYTGLPISPELLVSDSTEIDHIIPISISLDDSINNKVLVLSKANQVKGQQTPYDAWMDGSFKKINGKFSNWDDYQKWVESRHFSHKKENNLLETRNIFDSEQVEKFLARNLNDTRYASRLVLNTLQSFFTNQETKVRVVNGSFTHTLRKKWGADLDKTRETHHHHAVDATLCAVTPFVKVSRYHYAVKEETGEKVMREIDFETGEIVNEMSYREFKKSKKYERKTYQVKWPNFREQLKPVNLHPRIKFSHQVDRKANRKLSDATIYSVREKTEVKTLKSGKQKITTDEYTIGKIKDIYTLDGWEAFKKKQDKLLMKDLDEKTYERLLSIAETTPDFQEVEEKNGKVKRVKRSPFAVYCEENDIPAIQKYAKKNNGPLIRSLKYYDGKLNKHINITKDSQGRPVEKTKNGRKVTLQSLKPYRYDIYQDLETKAYYTVQLYYSDLRFVEGKYGITEKEYMKKVAEQTKGQVVRFCFSLQKNDGLEIEWKDSQRYDVRFYNFQSANSINFKGLEQEIMPAENQFKQKPYNNGAINLNIAKYGKEGKKLRKFNTDILGKKHYLFYEKEPKNIIK

SEQ ID NO: 414 - protein, 1150 aa, Enterococcus faecalis; identical to SEQ ID NO: 183

SEQ ID NO: 415 - protein, 1150 aa, Enterococcus faecalis; identical to SEQ ID NO: 184

SEQ ID NO: 416 - protein, 1340 aa, Enterococcus faecium
MKKEYTIGLDIGTNSVGWSVLTDDYRLVSKKMKVAGNTEKSSTKKNFWGVRLFDEGQTAEARRSKRTARRRLARRRQRILELQKIFAPEILKIDEHFFARLNESFLVLDEKKQSRHPVFATIKQEKSYHQTYPTIYHLRQALADSSEKADIRLVYLAMAHLLKYRGHFLIEGELNTENSSVTETFRQFLSTYNQQFSEADDKQTEKLDEAVDCSFVFTEKMSKTKKAETLLKYFPHEKSNGYLSQFIKLMVGNQGNFKNVFGLEEEAKLQFSKETYEEDLEELLEKIGDDYIDLFVQAKNVYDAVLLSEILSDSTKNTRAKLSAGMIRRYDAHKEDLVLLKRFVKENLPKKYRAFFGDNSVNGYAGYIEGHATQEDFYKFVKKELTGIRGSEVFLTKIEQENFLRKQRTFDNGVIPHQIHLTELRAIIANQKKHYPFLKEEQEKLESLLTFKIPYYVGPLAKKQENSPFAWLIRKSEEKIKPWNLPEIVDMEGSAVRFIERMNNTDMYIPHNKVLPKNSLLYQKFSIYNELTKVRYQDERGQMNYFSSIEKKEIFHELFEKNRKVTKKDLQEFLYLKYDIKHAELSGIEKAFNASYTTYHDFLTMSENKREMKQWLEDPELASMFEEIIKTLTVFEDREMIKTRLSHHEATLGKHIIKKLTKKHYTGWGRLSKELIQGIRDKQSNKTILDYLINDDDFPHHRNRNFMQLINDDSLSFKKEIKKAQMITDTENLEEIVKELTGSPAIKKGILQSLKIVDEIVGIMGYEPANIVVEMARENQTTGRGLKSSRPRLKALEESLKDFGSQLLKEYPTDNSSLQKDRLYLYYLQNGRDMYTGAPLDIHRLSDYDIDHIIPRSFTTDNSIDNKVLVSSKENRLKKDDVPSEKVVKKMRSFWYDLYSSKLISKRKLDNLTKIKLTEEDKAGFIKRQLVETRQITKHVAGILHHRFNKAEDTNEPIRKVRIITLKSALVSQFRNRFGIYKVREINEYHHAHDAYLNGVVALALLKKYPQLAPEFVYGEYLKFNAHKANKATVKKEFYSNIMKFFESDTPVCDENGEIFWDKSKSIAQVKKVINHHHMNIVKKTEIQKGGFSKETVEPKKDSSKLLPRKNNWDPAKYGGLGSPNVAYTVAFTYEKGKARKRTNALEGITIMEREAFEQSPVLFLKNKGYEQAEIEMKLPKYALFELENGRKRMVASNKEAQKANSFLLPEHLVTLLYHAKQYDEISHKESFDYVNEHHKEFSEVFARVLEFAGKYTLAEKNIEKLEKIYKENQTDDLAKLASSFVNLMQFNAMGAPADFKFFDVTIPRKRYTSLTEIWQSTIIHQSITGLYETRIRMGK

SEQ ID NO: 417 - protein, 1339 aa, Enterococcus faecium
MKKEYTIGLDIGTNSVGWSVLTDDYRLVSKKMKVAGNTEKSSTKKNFWGVRLFDEGQTAEARRSKRTARRRLARRRQRILELQKIFAPEILKIDEHFFARLNESFLVLDEKKQSRHPVFATIKQEKSYHQTYPTIYHLRQALADSSEKADIRLVYLAMAHLLKYRGHFLIEGELNTENSSVTETFRQFLSTYNQQFSEADDKQTEKLDEAVDCSFVFTEKMSKTKKAETLLKYFPHEKSNGYLSQFIKLMVGNQGNFKNVFGLEEAKLQFSKETYEEDLEELLEKIGDDYIDLFVQAKNVYDAVLLSEILSDSTKNTRAKLSAGMIRRYDAHKEDLVLLKRFVKENLPKKYRAFFGDNSVNGYAGYIEGHATQEDFYKFVKKELTGIRGSEVFLTKIEQENFLRKQRTFDNGVIPHQIHLTELRAIIANQKKHYPFLKEEQEKLESLLTFKIPYYVGPLAKKQENSPFAWLIRKSEEKIKPWNLPEIVDMEGSAVRFIERMINTDMYMPHNKVLPKNSLLYQKFSIYNELTKVRYQDERGQMNYFSSIEKKEIFHELFEKNRKVTKKDLQEFLYLKYDIKHAELSGIEKAFNASYTTYHDFLTMSENKREMKQWLEDPELASMFEEIIKTLTVFEDREMIKTRLSHHEATLGKHIIKKLTKKHYTGWGRLSKELIQGIRDKQSNKTILDYLINDDDFPHHRNRNFMQLINDDSLSFKKEIKKAQMITDTENLEEIVKELTGSPAIKKGILQSLKIVDEIVGIMGYEPANIVVEMARENQTTGRGLKSSRPRLKALEESLKDFGSQLLKEYPTDNSSLQKDRLYLYYLQNGRDMYTGAPLDIHRLSDYDIDHIIPRSFTTDNSIDNKVLVSSKENRLKKDDVPSEKVVKKMRSFWYDLYSSKLISKRKLDNLTKIKLTEEDKAGFIKRQLVETRQITKHVAGILHHRFNKAEDTNEPIRKVRIITLKSALVSQFRNRFGIYKVREINEYHHAHDAYLNGVVALALLKKYPQLAPEFVYGEYLKFNAHKANKATVKKEFYSNIMKFFESDTPVCDENGEIFWDKSKSIAQVKKVINHHHMNIVKKTEIQKGGFSKETVEPKKDSSKLLPRKNNWDPAKYGGLGSPNVAYTVAFTYEKGKARKRTNALEGITIMEREAFEQSPVLFLKNKGYEQAEIEMKLPKYALFELENGRKRMVASNKEAQKANSFLLPEHLVTLLYHAKQYDEISHKESFDYVNEHHKEFSEVFARVLEFAGKYTLAEKNIEKLEKIYKENQTDDLAKLASSFVNLMQFNAMGAPADFKFFDVTIPRKRYTSLTEIWQSTIIHQSITGLYETRIRMGK

SEQ ID NO: 418 - protein, 1340 aa, Enterococcus faecium
MKKEYTIGLDIGTNSVGWSVLTDDYRLVSKKMKVAGNTEKSSTKKNFWGVRLFDEGQTAEARRSKRTARRRLARRRQRILELQKIFAPEILKIDEHFFARLNESFLVLDEKKQSRHPVFATIKQEKSYHQTYPTIYHLRQALADSSEKADIRLVYLAMAHLLKYRGHFLIEGELNTENSSVTETFRQFLSTYNQQFSEADDKQTEKLDEAVDCSFVFTEKMSKTKKAETLLKYFPHEKSNGYLSQFIKLMVGNQGNFKNVFGLEEEAKLQFSKETYEEDLEELLEKIGDDYIDLFVQAKNVYDAVLLSEILSDSTKNTRAKLSAGMIRRYDAHKEDLVLLKRFVKENLPKKYRAFFGDNSVNGYAGYIEGHATQEDFYKFVKKELTGIRGSEVFLTKIEQENFLRKQRTFDNGVIPHQIHLTELRAIIANQKKHYPFLKEEQEKLESLLTFKIPYYVGPLAKKQENSPFAWLIRKSEEKIKPWNLPEIVDMEGSAVRFIERMINTDMYIPHNKVLPKNSLLYQKFSIYNELTKVRYQDERGQMNYFSSIEKKEIFHELFEKNRKVTKKDLQEFLYLKYDIKHAELSGIEKAFNASYTTYHDFLTMSENKREMKQWLEDPELASMFEEIIKTLTVFEDREMIKTRLSHHEATLGKHIIKKLTKKHYTGWGRLSKELIQGIRDKQSNKTILDYLINDDDFPHHRNRNFMQLINDDSLSFKKEIKKAQMITDTENLEEIVKELTGSPAIKKGILQSLKIVDEIVGIMGYEPANIVVEMARENQTTGRGLKSSRPRLKALEESLKDFGSQLLKEYPTDNSSLQKDRLYLYYLQNGRDMYTGAPLDIHRLSDYDIDHIIPRSFTTDNSIDNKVLVSSKENRLKKDDVPSEKVVKKMRSFWYDLYSSKLISKRKLDNLTKIKLTEEDKAGFIKRQLVETRQITKHVAGILHHRFNKAEDTNEPIRKVRIITLKSALVSQFRNRFGIYKVREINEYHHAHDAYLNGVVALALLKKYPQLAPEFVYGEYLKFNAHKANKATVKKEFYSNIMKFFESDTPVCDENGEIFWDKSKSIAQVKKVINHHHMNIVKKTEIQKGGFSKETVEPKKDSSKLLPRKNNWDPAKYGGLGSPNVAYTVAFTYEKGKARKRTNALEGITIMEREAFEQSPVLFLKNKGYEQAEIEMKLPKYALFELENGRKRMVASNKEAQKANSFLLPEHLVTLLYHAKQYDEISHKESFDYVNEHHKEFSEVFARVLEFAGKYTLAEKNIEKLEKIYKENQTDDLAKLASSFVNLMQFNAMGAPADFKFFDVTIPRKRYTSLTEIWQSTIIHQSITGLYETRIRMGK

SEQ ID NO: 419 - protein, 1340 aa, Enterococcus faecium
MKKEYTIGLDIGTNSVGWSVLTDDYRLVSKKMKVAGNTEKSSTKKNFWGVRLFDEGQTAEARRSKRTARRRLARRRQRILELQKIFAPEILKIDEHFFARLNESFLVLDEKKQSRHPVFATIKQEKSYHQTYPTIYHLRQALADSSEKADIRLVYLAMAHLLKYRGHFLIEGELNTENSSVTETFRQFLSTYNQQFSEADDKQTEKLDEAVDCSFVFTEKMSKTKKAETLLKYFPHEKSNGYLSQFIKLMVGNQGNFKNVFGLEEEAKLQFSKETYEEDLEELLEKIGDDYIDLFVQAKNVYDAVLLSEILSDSTKNTRAKLSAGMIRRYDAHKEDLVLLKRFVKENLPKKYRAFFGDNSVNGYAGYIEGHATQEDFYKFVKKELTGIRGSEVFLTKIEQENFLRKQRTFDNGVIPHQIHLTELRAIIANQKKHYPFLKEEQEKLESLLTFKIPYYVGPLAKKQENSPFAWLIRKSEEKIKPWNLPEIVDMEGSAVRFIERMINTDMYMPHNKVLPKNSLLYQKFSIYNELTKVRYQDERGQMNYFSSIEKKEIFHELFEKNRKVTKKDLQEFLYLKYDIKHAELSGIEKAFNASYTTYHDFLTMSENKREMKQWLEDPELASMFEEIIKTLTVFEDREMIKTRLSHHEATLGKHIIKKLTKKHYTGWGRLSKELIQGIRDKQSNKTILDYLINDDDFPHHRNRNFMQLINDDSLSFKKEIKKAQMITDTENLEEIVKELTGSPAIKKGILQSLKIVDEIVGIMGYEPANIVVEMARENQTTGRGLKSSRPRLKALEESLKDFGSQLLKEYPTDNSSLQKDRLYLYYLQNGRDMYTGAPLDIHRLSDYDIDHIIPRSFTTDNSIDNKVLVSSKENRLKKDDVPSEKVVKKMRSFWYDLYSSKLISKRKLDNLTKIKLTEEDKAGFIKRQLVETRQITKHVAGILHHRFNKAEDTNEPIRKVRIITLKSALVSQFRNRFGIYKVREINEYHHAHDAYLNGVVALALLKKYPQLAPEFVYGEYLKFNAHKANKATVKKEFYSNIMKFFESDTPVCDENGEIFWDKSKSIAQVKKVINHHHMNIVKKTEIQKGGFSKETVEPKKDSSKLLPRKNNWDPAKYGGLGSPNVAYTVAFTYEKGKARKRTNALEGITIMEREAFEQSPVLFLKNKGYEQAEIEMKLPKYALFELENGRKRMVASNKEAQKANSFLLPEHLVTLLYHAKQYDEISHKESFDYVNEHHKEFSEVFARVLEFAGKYTLAEKNIEKLEKIYKENQTDDLAKLASSFVNLMQFNAMGAPADFKFFDVTIPRKRYTSLTEIWQSTIIHQSITGLYETRIRMGK

SEQ ID NO: 420 - protein, 1339 aa, Enterococcus faecium
MKKEYTIGLDIGTNSVGWSVLTDDYRLVSKKMKVAGNTEKSSTKKNFWGVRLFDEGQTAEARRSKRTARRRLARRRQRILELQKIFAPEILKIDEHFFARLNESFLVLDEKKQSRHPVFATIKQEKSYHQTYPTIYHLRQALADSSEKADIRLVYLAMAHLLKYRGHFLIEGELNTENSSVTETFRQFLSTYNQQFSEADDKQTEKLDEAVDCSFVFTEKMSKTKKAETLLKYFPHEKSNGYLSQFIKLMVGNQGNFKNVFGLEEAKLQFSKETYEEDLEELLEKIGDDYIDLFVQAKNVYDAVLLSEILSDSTKNTRAKLSAGMIRRYDAHKEDLVLLKRFVKENLPKKYRAFFGDNSVNGYAGYIEGHATQEDFYKFVKKELTGIRGSEVFLTKIEQENFLRKQRTFDNGVIPHQIHLTELRAIIANQKKHYPFLKEEQEKLESLLTFKIPYYVGPLAKKQENSPFAWLIRKSEEKIKPWNLPEIVDMEGSAVRFIERMINTDMYIPHNKVLPKNSLLYQKFSIYNELTKVRYQDERGQMNYFSSIEKKEIFHELFEKNRKVTKKDLQEFLYLKYDIKHAELSGIEKAFNASYTTYHDFLTMSENKREMKQWLEDPELASMFEEIIKTLTVFEDREMIKTRLSHHEATLGKHIIKKLTKKHYTGWGRLSKELIQGIRDKQSNKTILDYLINDDDFPHHRNRNFMQLINDDSLSFKKEIKKAQMITDTENLEEIVKELTGSPAIKKGILQSLKIVDEIVGIMGYEPANIVVEMARENQTTGRGLKSSRPRLKALEESLKDFGSQLLKEYPTDNSSLQKDRLYLYYLQNGRDMYTGAPLDIHRLSDYDIDHIIPRSFTTDNSIDNKVLVSSKENRLKKDDVPSEKVVKKMRSFWYDLYSSKLISKRKLDNLTKIKLTEEDKAGFIKRQLVETRQITKHVAGILHHRFNKAEDTNEPIRKVRIITLKSALVSQFRNRFGIYKVREINEYHHAHDAYLNGVVALALLKKYPQLAPEFVYGEYLKFNAHKANKATVKKEFYSNIMKFFESDTPVCDENGEIFWDKSKSIAQVKKVINHHHMNIVKKTEIQKGGFSEETVEPKKDSSKLLPRKNNWDPAKYGGLGSPNVAYTVAFTYEKGKARKRTNALEGITIMEREAFEQSPVLFLKNKGYEQAEIEMKLPKYALFELENGRKRMVASNKEAQKANSFLLPEHLVTLLYHAKQYDEISHKESFDYVNEHHKEFSEVFARVLEFAGKYTLAEKNIEKLEKIYKENQTDDLAKLASSFVNLMQFNAMGAPADFKFFDVTIPRKRYTSLTEIWQSTIIHQSITGLYETRIRMGK

SEQ ID NO: 421 - protein, 1340 aa, Enterococcus faecium
MKKEYTIGLDIGTNSVGWSVLTDDYRLVSKKMKVAGNTEKSSTKKNFWGVRLFDEGQTAEARRSKRTARRRLARRRQRILELQKIFAPEILKIDEHFFARLNESFLVLDEKKQSRHPVFATIKQEKSYHQTYPTIYHLRQALADSSEKADIRLVYLAMAHLLKYRGHFLIEGELNTENSSVTETFRQFLSTYNQQFSEADDKQTEKLDEAVDCSFVFTEKMSKTKKAETLLKYFPHEKSNGYLSQFIKLMVGNQGNFKNVFGLEEEAKLQFSKETYEEDLEELLEKIGDDYIDLFVQAKNVYDAVLLSEILSDSTKNTRAKLSAGMIRRYDAHKEDLVLLKRFVKENLPKKYRAFFGDNSVNGYAGYIEGHATQEDFYKFVKKELTGIRGSEVFLTKIEQENFLRKQRTFDNGVIPHQIHLTELRAIIANQKKHYPFLKEEQEKLESLLTFKIPYYVGPLAKKQENSPFAWLIRKSEEKIKPWNLPEIVDMEGSAVRFIERMINTDMYIPHNKVLPKNSLLYQKFSIYNELTKVRYQDERGQMNYFSSIEKKEIFHELFEKNRKVTKKDLQEFLYLKYDIKHAELSGIEKAFNASYTTYHDFLTMSENKREMKQWLEDPELASMFEEIIKTLTVFEDREMIKTRLSHHEATLGKHIIKKLTKKHYTGWGRLSKELIQGIRDKQSNKTILDYLINDDDFPHHRNRNCMQLINDDSLSFKKEIKKAQMITDTENLEEIVKELTGSPAIKKGILQSLKIVDEIVGIMGYEPANIVVEMARENQTTGRGLKSSRPRLKALEESLKDFGSQLLKEYPTDNSSLQKDRLYLYYLQNGRDMYTGAPLDIHRLSDYDIDHIIPRSFTTDNSIDNKVLVSSKENRLKKDDVPSEKVVKKMRSFWYDLYSSKLISKRKLDNLTKIKLTEEDKAGFIKRQLVETRQITKHVAGILHHRFNKAEDTNEPIRKVRIITLKSALVSQFRNRFGIYKVREINEYHHAHDAYLNGVVALALLKKYPQLAPEFVYGEYLKFNAHKANKATVKKEFYSNIMKFFESDTPVCDENGEIFWDKSKSIAQVKKVINHHHMNIVKKTEIQKGGFSKETVEPKKDSSKLLPRKNNWDPTKYGGLGSPNVAYTVAFTYEKGKARKRTNALEGITIMEREAFEQSPVLFLKNKGYEQAEIEMKLPKYALFELENGRKRMVASNKEAQKANSFLLPEHLVTLLYHAKQYDEISHKESFDYVNEHHKEFSEVFARVLEFAGKYTLAEKNIEKLEKIYKENQTDDLAKLASSFVNLMQFNAMGAPADFKFFDVTIPRKRYTSLTEIWQSTIIHQSITGLYETRIRMGK

SEQ ID NO: 422 - protein, 892 aa, Enterococcus faecium
MTFKIPYYVGPLAKKQENSPFAWLIRKSEEKIKPWNLPEIVDMEGSAVRFIERMINTDMYMPHNKVLPKNSLLYQKFSIYNELTKVRYQDERGQMNYFSSIEKKEIFHELFEKNRKVTKKDLQEFLYLKYDIKHAELSGIEKAFNASYTTYHDFLTMSENKREMEQWLEDPELASMFEEIIKTLTVFEDREMIKTRLSHHKATLGKHIIKKLTKKHYTGWGRLSKELIQGIRDKQSNKTILDYLINDDDFPHHRNRNFMQLINDDSLSFKKEIKKAQMITDTENLEEIVKELTGSPAIKKGILQSLKIVDEIVGIMGYEPANIVVEMARENQTTGRGLKSSRPRLKALEESLKDFGSQLLKEYPTDNSSLQKDRLYLYYLQNGRDMYTGAPLDIHRLSDYDIDHIIPRSFTTDNSIDNKVLVSSKENRLKKDDVPSEKVVKKMRSFWYDLYSSKLISKRKLDNLTKIKLTEEDKAGFIKRQLVETRQITKHVAGILHHRFNKAEDTNEPIRKVRIITLKSALVSQFRNRFGIYKVREINEYHHAHDAYLNGVIALALLKKYPQLAPEFVYGEYLKFNAHKANKATVKKEFYSNIMKFFESDTPVCDENGEIFWDKSKSIAQVKKVINHHHMNIVKKTEIQKGGFSKETVEPKKDSSKLLPRKNNWDPAKYGGLGSPNVAYTVAFTYEKGKARKRTNALEGITIMEREAFEQSPVLFLKNKGYEQAEIEMKLPKYALFELENGRKRMVASNKEAQKANSFLLPEHLVTLLYHAKQYDEISHKESFDYVNEHHKEFSEVFARVLEFAGKYTLAEKNIEKLEKIYKENQTDDLAKLASSFVNLMQFNAMGAPADFKFFDVTIPRKRYTSLTEIWQSTIIHQSITGLYETRIRMGK

SEQ ID NO: 423 - protein, 1336 aa, Enterococcus hirae
MTKDYTIGLDIGTNSVGWAVLTDDYQLMKRKMSVHGNTEKKKIKKNFWGARLFDEGQTAEFRRTKRTNRRRLARRKYRLSKLQDLFAEELCKQDDCFFVRLEESFLVPEEKQYKPASIFPTLEEEKEYYQKYPTIYHLRQKLVDSTEKEDLRLVYLALAHLLKYRGHFLFEGDLDTENTSIEESFRVFLEQYSKQSDQPLIVHQPVLTILTDKLSKTKKVEEILKYYPTEKINSFFAQCLKLIVGNQANFKRIFDLEAEVKLQFSKETYEEDLESLLEKIGDEYLDIFLQAKKVHDAILLSEIISSTVKHTKAKLSSGMVERYERHKADLAKFKQFVKENVPQKATVFFKDTTKNGYAGYIKGKTTQEEFYKFVKKELSGVVGSEPFLEKIDQETFLLKQRTYTNGVIPHQVHLIELKAIIDQQKQHYPFLEEAGPKIIALFKFRIPYYVGPLAKEQEASSFAWIERKTAEKINPWNFSEVVDIEKSAMRFIQRMTKQDTYLPTEKVLPKNSLLYQKYMIFNELTKVSYKDERGVKQYFSGDEKQQIFKQLFQKERGKITVKKLQNFLYTHYHIENAQIFGIEKAFNASYSTYHDFMKLAKTNQKAMQEWLEQPEMEPIFEDIVKILTIFEDRQMIKHQLSKYQEVFGEKLLKEFARKHYTGWGRFSAKLIHGIRDRKTNKTILDYLINDDDVPANRNRNLMQLINDEHLSFKEEIAKATVFSKHKSLVDVIQDLPGSPAIKKGIWQSLKIVEELIAIIGYKPKNIVIEMARENQKTHRTSPRLKALENGLKQIGSTLLKEQPTDNKALQKERLYLYYLQNGRDMYTGEPLEIENLHQYEVDHIIPRSFIVDNSIDNKVLVASKQNQKKRDDVPKKQIVNEQRIFWNQLKEAKLISPKKYAYLTKIELTPEDKARFIQRQLVETRQITKHVANILHQSFNQEEEGTDCDGVQIITLKATLTSQFRQTFGLYKVREINPHHHAHDAYLNGFIANVLLKRYPKLAPEFVYGKYVKYSLARENKATAKKEFYSNILKFLESDEPFCDENGEIYWEKSHHLPRIKKVLSSHQVNVVKKVEQQKGGFYKETVNSKEKPDKLIERKNNWDVTKYGGFGSPVIAYAIAFVYAKGKTQKKTRAIEGITIMEQAAFEKDPTTFLKEKGFPQVTEFIKLPKYTLFEFDNGRRRFLASHKESQKGNPFILSDQLVTLLYHAQHYDKITYQESFDYVNTHLSDFSAILTEVLAFAEKYTLADKNIERIQELYEENKYGETSMIAQSFLQLLQFNAIGAPADFKFFGVTIPRKRYTSLTEIWDATIIYQSVTGLYETRIRMGDLWAGEQ

SEQ ID NO: 424 - protein, 116 aa, Enterococcus sp.
MYSIGLDLGISSVGWSVIDERTGNVIDLGVRLFSAKNSEKNLERRTNRGGRRLIRRKTNRLKDAKKILAAVGFYEDKSLKNSCPYQLRVKGLTELLSKGEIYKVTLHILKNVELVT

SEQ ID NO: 425 - protein, 1391 aa, Eubacterium sp.
MENKQYYIGLDVGTNSVGWAVTDTSYNLLRAKGKDMWGARLFDEAKTAVERRTKRTSRRRSEREKARKAMLKELFADEINKVDPNFFIRLEESKFFLDDRSENNRQRYTLFNDAKFTDKDYYEKYKTIFHLRSALINSDEKFDVRLVFLAILNLFSHRGHFLNASLKGDGEIQGVDIFYNDLYEVCEEFEIDLPQISNIDNFEKILSQKGKSRTKILEELSEELSISKKEKIKYSLLKLICGMKIKVVDIYADEDIQEDDKKKDLGFRESDYEKSSLEVKEIIGDDHFELIERAKAVHDIGLLANIIGNSKYLCEARVEAYDNHHKDLQKIKELLKKYDIKAYTDMFRKMTDKNYSAYVGSVNSNIAKERRSVDNRKIEDLYEYIKKIALKNISDDNEDKIEILKKIETGEFLKKQLTASNGVIPNQLQSRELRAILKKAENYLPFLKEKGEKNLTVSEMIIQLFEFQIPYYVGPLDKNPKKDKNANSWAVIPSGGRILPWNFEDKVDVKGSRKEFIEKMVRKCTYLSEEHTLPKQSLLYEKFMVLNEINNIKIDGEKISVEAKQKIYNDLFMKGKKVSQKAIKQELISLNIMSKDSVLSGIDTVCNAYLSSIAKFRGVFDENVNNQSTIDMIEDIIFLKTVYSDEKRFVKEEIVEKYGDEIDKDKIKRILGFKFSNWGNISKSFLELEGADVGTGEIRSIIQSLWETNFNLMELLSSRFTYMDELEKRVKKLEKPLSEWTIEDLDDMYLSSPVKRMIWQSMKIVDEIQTVIGYAPKRIFVEMTRSEGEKVRTKSRKDRLKELYSAIKEDSKQWVKELDAKDESYFRSKKMYLYYLQKGRCMYSGEVIELDKLMDDNLYDIDHIYPRSFVKDDSLDNLVLVKKEINNRKQNDPITPQIQASCQGFWKVLHEQGFISNEKYSRLTRKTQEFSDEEKLSFINRQIVETGQATKCMAQILQKSMGEDVDVVFSKARLVSEFRHKFELFKSRLINDFHHANDAYLNIVVGNSYFVKFTRNPANFIKDARKNPDNPAYKYHMDRFFERDVKSKSEVAWIGQSEGNAGTIAIVKKTMSKNSPLITKKVEEGHGSITKETIVGVKEIKFGRNKVEKADKTPKKANLQAYRPIKTSDERLCNILRYGGRTSISISGYCLVEYVKKRKTIRSLEAIPVYLGRKDSLSEEKLLNYFRYNLNDGGKDSVSDIRLCLPFISTNSLVKIDGYLYYLGGKNDDRIQLYNAYQLKMKKEEVEYIRKIEKAVSMSKFDEIDREKNPVLTEEKNIELYNKIQDKFENTVFSKRMSLVKYNKKDLSFGDFLKNKKSKFEEIDLEKQCKVLYNIIFNLSNLKEVDLSDIGGSKSTGKCRCKKNITNYKEFKLIQQSITGLYSCEKDLMTI

SEQ ID NO: 426 - protein, 1391 aa, Eubacterium yurii
MENKQYYIGLDVGTNSVGWAVTDTSYNLLRAKGKDMWGARLFEKANTAAERRTKRTSRRRSEREKARKAMLKELFADEINRVDPSFFIRLEESKFFLDDRSENNRQRYTLFNDATFTDKDYYEKYKTIFHLRSALINSDEKFDVRLVFLAILNLFSHRGHFLNASLKGDGDIQGMDVFYNDLVESCEYFEIELPRITNIDNFEKILSQKGKSRTKILEELSEELSISKKDKSKYNLIKLISGLEASVVELYNIEDIQDENKKIKIGFRESDYEESSLKVKEIIGDEYFDLVERAKSVHDMGLLSNIIGNSKYLCEARVEAYENHHKDLLKIKELLKKYDKKAYNDMFRKMTDKNYSAYVGSVNSNIAKERRSVDKRKIEDLYKYIEDTALKNIPDDNKDKIEILEKIKLGEFLKKQLTASNGVIPNQLQSRELRAILKKAENYLPFLKEKGEKNLTVSEMIIQLFEFQIPYYVGPLDKNPKKDNKANSWAKIKQGGRILPWNFEDKVDVKGSRKEFIEKMVRKCTYISDEHTLPKQSLLYEKFMVLNEINNIKIDGEKISVEAKQKIYNDLFVKGKKVSQKDIKKELISLNIMDKDSVLSGTDTVCNAYLSSIGKFTGVFKEEINKQSIVDMIEDIIFLKTVYGDEKRFVKEEIVEKYGDEIDKDKIKRILGFKFSNWGNLSKSFLELEGADVGTGEVRSIIQSLWETNFNLMELLSSRFTYMDELEKRVKKLEKPLSEWTIEDLDDMYLSSPVKRMIWQSMKIVDEIQTVIGYAPKRIFVEMTRSEGEKVRTKSRKDRLKELYNGIKEDSKQWVKELDSKDESYFRSKKMYLYYLQKGRCMYSGEVIELDKLMDDNLYDIDHIYPRSFVKDDSLDNLVLVKKEINNRKQNDPITPQIQASCQGFWKILHDQGFMSNEKYSRLTRKTQEFSDEEKLSFINRQIVETGQATKCMAQILQKSMGEDVDVVFSKARLVSEFRHKFELFKSRLINDFHHANDAYLNIVVGNSYFVKFTRNPANFIKDARKNPDNPVYKYHMDRFFERDVKSKSEVAWIGQSEGNSGTIVIVKKTMAKNSPLITKKVEEGHGSITKETIVGVKEIKFGRNKVEKADKTPKKPNLQAYRPIKTSDERLCNILRYGGRTSISISGYCLVEYVKKRKTIRSLEAIPVYLGRKDSLSEEKLLNYFRYNLNDGGKDSVSDIRLCLPFISTNSLVKIDGYLYYLGGKNDDRIQLYNAYQLKMKKEEVEYIRKIEKAVSMSKFDEIDREKNPVLTEEKNIELYNKIQDKFENTVFSKRMSLVKYNKKDLSFGDFLKNKKSKFEEIDLEKQCKVLYNIIFNLSNLKEVDLSDIGGSKSTGKCRCKKNITNYKEFKLIQQSITGLYSCEKDLMTI

SEQ ID NO: 427 - protein, 1142 aa, Facklamia hominis
MYSVGLDIGIASCGYSIINDVNGNIVELGTLLFKSRNSDNNEERRTNRGSRRLINRRRTRLDDGKKLLAEKGFKQDSKLKHVCPYELRVKGLHEKLTQGEIYKVVLHILKKRGISYLDESDENSSGIDGASYKDQVNLNLNLQKELTPGQIQLKRLKENGRIKSGVTFENGYQLNVFSVSAYANELNKILTKQSEYYSEIDQIWIDRFTKNGYRKEAGLVYRKRPYYDGPGNEKNNSIYGRWANFKEDGHPKENIFDQLIGLDSVDSTQVRASASTLTAQKYNLLNDLNNLTIIEDDRKFTTDEKVSIINYLMTQDITRFGPKELAKFYQLEVDQIRGWRIDNKGNPEIHSLKVYRDWKKIFNTSSIDLTSIQTWVVDELANVITLNTEIPSTLATLKIKIPDIDQQILNFVENNFYELKKKTSKNSWHSFSLKTLNILIPELLNTSEEQNTILERLNLKFDLKNKYAEKNQIPVKELLEQIYNPTVTKSVHQSIKLFNEIIEKYGKNNISYVTIEMPRDKNDQDQKDTIKRINKLNSERKNDSEKYFLERSGWDTIRFESALKKPRFAEKLLFYYEQKGKCAYSGQDILAESLLNESCEVDHIIPLSISFDDSIHNKVLVTASSNQEKGQRTPYMAFIDGAKLGQSWDDFVAWVNSCGFHRKKVQNLLYEENIFNPDVQRGFVSRNLNDTRYASRIVLNAIQSFFYKQKDLTKVKVVNGSFTHTLRKKWGSSLDKNRDTYHHHAVDATLCAVTPFINIVKYEFFEEDGIKYMVDLTTGEKVAYSDYKKMKFYDKRAYVPIWDGFIKQLTPANLYPKIKFSHQVDSKWNRKISDATIYSTRKIVETKINKKGVAKETVKDIVIDKIKDIYTPEGWRKFKEKQDKLLMKNFDEKTYNKLIKIAKEYPEKKEVQTSNGKVSLVEVSPFKMYCEEQNVPAIRKYSKKGNGPYIRSLKFYDKELGKHINITKDSYGNDIERTIRNKKIILKNQNSWRTDVYYNSVNNCYELLGIKYCHLKFYRGKYGIPKSIYDELKKEDEISSESVFKFSLYRHDRVRFEKDGEYIEALFGSKNESNKNYLELSPIDKNKWLSKENVKFFGEVAASGRFIKGLKPGIKVIKQSTDYMGHVYAIHQEKLKFVLSDA

SEQ ID NO: 428 - protein, 1347 aa, Finegoldia magna
MKSEKKYYIGLDVGTNSVGWAVTDEFYNILRAKGKDLWGVRLFEKAKTAADTRTFRSGRRRNDRKGMRLQILREIFEDEIKKVDKDFYDRLDESKFWAEDKKVSGKYSLFNDKNFSDKQYFEKFPTIFHLRKYLMEEHGKVDIRYYFLAINQMMKRRGHFLIDGQISHVTDDKPLKEQLILLINDLLKIELEEELMDSIFEILADVNEKRTDKKNNLKELIKGQDFNKQEGNILNSIFESIVTGKAKIKNIISDEDILEKIKEDNKEDFVLTGDSYEENLQYFEEVLQENITLFNTLKSTYDFVILQSILKGKSTLSDAQVERYDEHKKDLEILKKVIKKYDEDGKLFKQVFKEDNGNGYVSYIGYYLNKNKKITAKKKISNIEFTKYVKGILEKQCDCEDEAVKYLLGKIEQENFLLKQISSINSVIPHQIHLFELDKILENLAKNYPSFNNKKEEFTKIEKIRKTFTFRIPYYVGPLNDYHKNNGGNAWIFRNKGEKIRPWNFEKIVDLHKSEEEFIKRMLNQCTYLPEETVLPKSSILYSEYMVLNELNNLRIKGKPLDTDVKLKLIEELFKKKTKVTLKSIRDYMIRNNFADKEDFDNSEKNLEIVSNMKSYIDFNNILGDKFELEMVEDLIEKITIHTGNKTLLKKYIEETYPDLSSSQIQKIINLKYKDWGRLSRKLLDGIKGRNKTDDVNTVINFMRNSSDNLMQIIEGKNYSFNEYIDNLRKKYIPQEISYEVVENLYVSPSVKKMIWQVIRVTEEITKVMGYDPDKIFIEMAKSEEEKKTTISRKNKLLDLYKAIKKDERDSQYEKLLTGLNKLDESELRSKKLYLYYTQMGRDMYTGEKIDLDKLFDSTHYDKDHIIPQSMKKDDSIINNLVLVNKNANQTTKGNIYPVPSSIRNNPDIYNYWKYLMEKEFISKEKYNRLIRNTPLTNEELGVFINRQLVETRQSTKAIKELFEKFYQKSKIIPVKASLASDLRKDMNTLKSREVNDLHHAHDAFLNIVAGDVWNREFTSNPINYVNENREGDKVKYSLSKYFTRPRKSKGKVIWTPEKGRKLIVDTLNKPSVLISNESHVKKGELFNATISGKKDYKKGKIYLPLKKDDRLKDVSKYGGYKAINGAFFFLVEHTKSKKRIRSIELFPLHLLSKFYEDKNTVLDYAINVLQLQDPKIIIDKINYRTEIIIDNFSYLISTKSNDGSITVKPNEQMYWRVDEISNLKKIENKYKKDAILTEEDRKIMESYIDKIYQQFKAGKYKNRRTTDTIIEKYEIIDLDTLDNKQLYQLLVAFISLSYKTSNNAVDFTVIGLGTECGKPRITNLPDNTYLVYKSITGIYEKRIRIK

SEQ ID NO: 429 - protein, 1348 aa, Finegoldia magna; identical to SEQ ID NO: 227

SEQ ID NO: 430 - protein, 1516 aa, Flavobacteriaceae bacterium
MLKQQKDKIIGMNKKILGLDLGTNSIGWALVKQDLENKYGEIIGCGSRIIPMSQDVLGKFDAGISISQTAERTNYRSVRKLIQRNTLRRERLHRVLHQLDFLPKHYNDSIDFEKKLGQFKTDKETKLNYFVNQHGKHEFLFKDSFNEMVKEFKEEQPELFYIKNNGKETKIPYDWTIYYLRKKALSKKISKEELSWLVLNFNQKRGYYQLRGEIDEEKEKNKRYEKLYVSEVVKTNNTIKKTGEYLYDIYFDNGWKYEKQTTKPQDWLHKHKEFIITTTTLKNGETKRTFKTVDSEKDWIAIKSKTEQDIKESNKTVGAFIYDTLLKNPTQKIRGSLVKTIERKFYREEFEKILKEQIKHRPEINVNTAIGKENYTKCVTELYPRNEAHANNILTNDFNYLFTKDILFYQRPLKSKKSEIANCQYEYRTYIKKKEKTGKEERVKQPLKATPKSHPLFQEFRLWQFIHNLKIYIRETTVGNKPLFDVDITDTFFTSENDWATLFEYLNNKKEIEQKHVLEYLVSKKIISKSEKTDYRWNYVEDKKYPGNETRVDFINRLKKVENLNVDEFLTSELEFKLWHIIYSVTDKNEYEKALENFAIRQNIDKDSFVNSFKKFPPFKSDYGAYSTKAIKKLLPLMRLGKFWDGSEIPKVVVEKITDIKTRLTSVNYDESLFKKDEKKILETIVDDITPKQLLKSFVKLKGKNHLAGLNTYQACYLVYERHSESSDITQWENPDDIDSFLNHFKQHSLRNPIVEQVVTETLRTVRDIWKYYGNGSPNYFNEIHIELGREMKNPADKRKQMSAKINENENTNQRIKGILQELMNDGVQDIKPYSPSQQEILKIYEEGISQNPNVDYSKVSEDEITKIKKSNNPTLKEIQRYKLWLEQKYISPYTGKPIPLSELFTPAYQIEHIIPQSRYFDNSLSNKIICESEVNEDKSNKTAYEYLKTNGGSIVHGHHLLSLKEYEDHCQHYFKKNRTKLKNLLSEEIPEGFINRQLNDSRYISKLIKGLLSNIVREENEQEATSKNIVPVTGSITSKLKQDWGLNDKWNEIIAPRFKRLNKMTNSNDFGYFDEKINTFRIQVPDAISRGFNKKRIDHRHHTLDALVIACCTKKHIQYLNSLNNEIIKHELKPSILIKNAQGDYTKHFMLPWNNFPIDCKNAIENTIVSFKQNLRVINKTSNKYQSYKDENGNLRLGKDGKPKKGLTKQTKGNNWAVRKAMHEDTFYGEIVDGENKGKLKIKTLLDTSFDVKKIEDKVLDKSIRTILINYLKQDKYKNLSKPHEEAFSPNGIIEMNKNIISLNNNIPHKPIKRVTLKHEKGKKFSIKTLLDKKTKFAKSATGTNVFFCIYKNINGKIKYHTPSFEEIIEIQKQEFEIKYKSKLNVPETLFDKKESFELLFYLQPNDLVYLPNDEELKNRQLIDFNNLNKKQIKRIYKFTDGSGTTANFIPYQVAKVIFNLNKKEQAKSSFKYPIQNEFGVGSPQSKNQKSIEGILIKERCIKLKIDRLGNISKA

SEQ ID NO: 431 - protein, 1629 aa, Francisella cf.
MNFKILPIAIDLGVKNTGVFSAFYQKGTSLERLDNKNGKVYELSKDSYTLLMNNRTARRHQRRGIDRKQLVKRLFKLIWTEQLNLEWDKDTQQAISFLFNRRGFSFITDGYSPEYLNIVPEQVKAILMDIFDDYNGEDDLDSYLKLATEQESKISEIYNKLMQKILEFKLRKLCTDIKDDKVSTKTLKEITSYEFELLADYLANYSEILKTQKFSYTDKQGNLKELSYYHHDKYNIQEFLKRHATINIQILDTLLTDDLDIWNFNFEKFDFDKNEEKLQNQEDKDHIQAHLHHFVFAVNKIKSEMASGGRHRSQYFQEITNVLDENNHQEGYLKNFCENLHNKKYSNLSVKNLVNLIGNLSNLELKPLRKYFNDKIHAKADHWDEQKFTETYCHWILGEWRVGVKDQDKKDGAKYSYKDLCNELKQKVTKAGLVDFLLELDPCRTIPPYLDNNNRKPPKCQSLILNPKFLDNQYPNWQQYLQELKKLQSIQNYLESFETDLKVLKSSKDQPYFVEYRSSNQQIASGQRDYKDLDARILQFIFDRVKASDELLLNEIYFQAKKLKQKASSELEKLESSKKLDEVIANSQLSQILKSQHTNGIFEQGTFLHLVCKYYKQRQRARDSRLYIMPEYRYDKKLHKYNNTGRFDDDNQLLTYCNHKPRQKRYQLLNDLAGVLQVSPNFLKDKIGSDDDLFISKWLVEHIRGFKKACEDSLKIQKDNRGLLNHKINIARNTKGKCEKEIFNLICKIEGSEDKKGNYKHGLAYELGVLLFGEPNEASKPEFDRKIKKFNSIYSFAQIQQIAFAERKGNANTCAVCSADNAHRMQQIKITEPVEDNKDKIILSAKAQRLPAITTRIVDGAVKKMATILAKNIVDDNWQNIKQVLSAKHQLHIPIITESNAFEFEPALADVKGKSLKDRRKKALERISPENIFKDKNNRIKEFAKGISAYSGANLTDGDFDGAKEELDHIIPRSHKKYGTLNDEANLICVTRGDNKNKGNRIFCLRDLANNYKLKQFETTDDLEIEKKIADTIWDANKKDFKFGNYRSFINLTPQEQKAFRHALFLADENPIKQAVIRAINNRNRTFVNGTQRYFAEVLANNIYLRAKKENLNTDKISFDYFGIPTIGNGRGIAEIRQLYEKVDSDIQAYAKGDKPQASYSHLIDAMLAFCIAADEHRNDGSIGLEIDKNYSLYPLDKNTGEVFTKDIFSQIKITDNEFSDKKLVRKKATEGFNTHRQMTRDGIYAENYLPILIHKELDEVRKGYTWKNSEEIKIFKGKKYDIQQLNNLLYCLKFVDKPISIDIQISTLEELRNILTTNNIAATAEYYYINLKTQKLHEYYIENYNTALGYKKYTKEMEFLRSLAYRSERVKIKSIDDVKQVLDKDSNFIIGKITLPFKKEWQRLYREWQNITIKDDYEFLKSFFNVKSITKLHKKVRKDFSLPISTNEGKFLVKRKTWDNNFIYQILNDSDSRVDGTKPFIPAFDISKNEIVEAIIDSFTSKNIFWLPKNIELQKVDNKNIFAIDTSKWFEVETPSDLRDIGVATIQYKIDNNSRPKVRVKLDYVIDDDSKINYFTNHSLLKSRYPDKVLEILKQSTIIEFESSGFNKTIKEMLGMTLAGIYNETSNN

SEQ ID NO: 432 - protein, 1646 aa, Francisella cf.
MNIKILPIAIDLGAKNTGVFSAFYQKGTSLESLDNKNGKVYELSKDSYTLLMNNRTARRHQRRGIDRKQLVKRLFKLIWTKQLNLEWNKDTQQTISFLLNRRGFSFITDGYSPEYLNIAPEAVKAILMSILDDYNGEDDLDSYLQSATENDSKIDELYNKLLQKALEFKLRKLCIDIKEDKVTTKTLKELSNTEFKLLANYLVDYDRILRTQKFSYTDKQGNLRELNYYHHDKYNIQEFLKRNIIINDVILEKLTDDLDIWNLNFDKFDFEKNLEKLENQEDKDYLQTHLHHFVFAVNKIKSEMASGGRHRSQYFQEITNVLVENNHQEGYLKNFCENLHNKKYSNLSVKNLVNLIGNLSNLELKPLRKYFNDKIHAKADYWDEQKFAETYSDWILGEWRVGAKDKDKKDGAKYSYKNLCDELKQKVGINQDGIINQTKSDFVDFLLELDPCRTIPPYLDNNNRKPPKCQSLILNPKFLDNKYPNWQQYLQELKKLQTVQNYLGNFEIDLKDLKSSKEQPYFVKYKSLNQQIASGQRDYKDLDARVLQFIFDRVKASDELLLNEIYSHAKKLKQNTSSELEKLELCKKLDEVIANSQLSQILKSQHVNGIFEQGTFLHLVCKYYKQRQRARDSRLYIMPEYRYDKKLDKYNNTGRFDDDNQLLTYCNHKPRQKRYQLLNDLAGVLQVSPNFLKDKIGSDDDLFISKWLVEHIRGFKKACEDSLKIQKDNRGLLNHKINIARNTKGKCEKEIFNLICKIEGSEDKKGNYKHGLAYELGVLLFGEPNQASKLEFDRKIKKFNSIYSFAQIQQIAFAERKGNANTCAVCSADNAHRMQQIKVAKPVEGNKDNIILSAKAQRLPAIPTRIVDGAVKKIATILARNIVDDNWDNIKQALSNNQQLHVPIITESNAFEFEPALADIKGKSLKDKRKKALERIDPENVFKDKNNRIKEFAKGISAYSDANLANGDFDGAKEELDHIIPRSHKKYGTLNDEANLICVTREDNQNRGNKAVFLYDLKPNYKLKQFNTTDDLEIEKKIADTIWDASKQDFKFGNYRSFINLTPQEQIAFRHALFLADKNPIKKAVIRAIDNRNRTFVNGTQRYFAEVLANNIYLRAKKENLATNRITFDYFGIETTNSNGRGIADVRKLYEKVDSDIQAYAKGDKPQDSYSHLIDAMIAFCVAADEHKNEGSIGLKMGNQYGLFPTPDKYDENTGEIISWHNDDIFRKIKVSDNQFSDKKLVRKKATEGFNTHRQMTRDGIYGESYLPILIHKNLNEVRKGYNWENSEEIKIFKGKKYDIQQLNNLVYCLKFVDKPISIDIQITTLEELRNILETNNISTTAEYYYINLKTQKLHEYYIENYNTALGYKKYTKEMEFLRSLAYRTERVKIKSIDDVSMILAKDSNFKAGKIELPFKTEWQRLYLEWQNTTIKDNHEFLKSYFSVKNATKQHKKVRKDFSLPISTNEGKLLVKRKTWDNNFIYQILNDSDSRADGTKPFIPAFDISKNEIVETIIKSFTSKNIFWLPKNIELQKVDNKSIFAIDTSRWFEVETPKDLIEIGVSTIQYKIDNNSRPKVRVKLDYVMDDDSKINYFMNHSLLKSRYPDKVLEILKQSTIIEFESSGFNKTIKEMLGMTLAGIYNETSNN

SEQ ID NO: 433 - protein, 1629 aa, Francisella novicida
MNFKILPIAIDLGVKNTGVFSAFYQKGTSLERLDNKNGKVYELSKDSYTLLMNNRTARRHQRRGIDRKQLVKKLFKLIWTEQLNLEWDKDTQQAISFLFNRRGFSFITDGYSPEYLNIVPEQVKAILMDIFDDYNGEDDLDSYLKLATEQESKISEIYNKLMQKILEFKLRKLCTDIKDDKVSTKTLKEITSYEFELLADYLANYSESLKTQKFSYTDKQGNLKELSYYHHDKYNIQEFLKRHATINDEILDTLLTDDLDIWNFNFEKFDFDKNEEKLQNQEDKDHTQAHLHHFVFAVNKIKSEMASGGRHRGQYFQEITNVLDENNHQEGYLKNFCENLHNKKYSNLSVKNLVNLIGNLSNLELKPLRKYFNDKIHAKADHWDEQKFTETYCHWILGEWRVGLKDQDKKEGAKYSYKDLCNELKQKVTNAGLIDFLLELDPCRTIPPYLDNNNRKPPKCQSLILNPKFLDNQYPNWQQYLQELKKLQIIQDYLESFETDLKVLKSSKDQPYFVEYKSSNQQIASGQRDYKDLDARILQFIFDRVKASDELLLNEIYFQAKKLKQKASSELEKLESSKKLDEVIANSQLSKILKSQHTNGIFEQGTFLHLVCKYYKQRQRARDSRLYIMPEYRYDKKLDKYNNTGRFDDDNQLLTYCNHKPRQKRYQLLNDLAGVLQVSPNFLKDKIGSDDDLFISKWLVEHIRGFKKACEDSLKIQKDNRGLLNHKINIARNTKGKCEKEIFNLICKIEGSEDKKGNYKHGLAYELGVLLFGEPNEASKPEFDRKIKKFNSIYSFAQIQQIAFAERKGNANTCAVCSADNAHRMQQIKITEPVEDNKDKIILSAKAQRLPAIPTRIVDGAVKKMATILAKNIVDDNWQNIKQVLSAKHQLHIPIITESNAFEFEPALADVKGKSLKDRRKKALERISPENIFKDKNNRIKEFAKGISAYSGANLTDGDFDGAKEELDHIIPRSHKKYGTLNDEANLICVTRDDNKNKGNRIFCLHDLANNYKLKQFETTDDLEIEKKIADTIWDASKKDFKFGNYRSFINLTPQEQKAFRHALFLADENPIKQAVIRAINNRNRTFVNGTQRYFAEVLANNIYLRAKKENLNTDKISFDYFGIPTIGNGRGIAEIRQLYEKVDSDIQVYAKGDKPQASYSHLIDAMLAFCIAADEHRNDGSIGLEIDKNYSLYPLDKNTGEVFTKDIFSQIKITDNEFSDKKLVRKKATEGFNTHRQMTRDGIYAENYLPILIHKELDEVRKGYTWKNSEEIKIFKGKKYDIQQLNNLLYCLKFVDKPISIDIQISTLEELRNILTTNNIAATAEYYYINLKTQKLHEYYIENYNTALGYKKYTKEMEFLRSLAYRSERVKIKSIDDVKQVLDKDSNFIIGKITLPFKKEWQRLYREWQNTTIKDDYEFLKSFFNVKSITKLHKKVRKDFSLPISTNEGKFLVKRKTWDNNFIYQILNDSDSRVDGTKPFIPAFDISKNEIVEAIIDSFTSKNIFWLPKNIELQKVDNKNIFAIDTSKWFEVETPSDLRDIGVATIQYKIDNNSRPKVRVKLDYVIDDDSKINYFTNHSLLKSRYPDKVLEILKQSTIIEFESSGFNKTIKEMLGMTLAGIYNETSNN

SEQ ID NO: 434 - protein, 1629 aa, Francisella novicida
MNFKILPIAIDLGVKNTGVFSAFYQKGTSLERLDNKNGKVYELSKDSYTLLMNNRTARRHQRRGIDRKQLVKRLFKLIWTEQLNLEWDKDTQQAISFLFNRRGFSFITDGYSPEYLNIVPEQVKAILMDIFDDYNGEDDLDSYLKLATEQESKISEIYNKLMQKILEFKLMKLCTDIKDDKVSTKTLKEITSYEFELLADYLANYSESLKTQKFSYTDKQGNLKELSYYHHDKYNIQEFLKRHATINDRILDTLLTDDLDIWNFNFEKFDFDKNEEKLQNQEDKDHIQAHLHHFVFAVNKIKSEMASGGRHRSQYFQEITNVLDENNHQEGYLKNFCENLHNKKYSNLSVKNLVNLIGNLSNLELKPLRKYFNDKIHAKADHWDEQKFTETYCHWILGEWRVGVKDQDKKDGAKYSYKDLCNELKQKVTKAGLVDFLLELDPCRTIPPYLDNNNRKPPKCQSLILNPKFLDNQYPNWQQYLQELKKLQSIQNYLDSFETDLKVLKSSKDQPYFVEYKSSNQQIASGQRDYKDLDARILQFIFDRVKASDELLLNEIYFQAKKLKQKASSELEKLESSKKLDEVIANSQLSQILKSQHTNGIFEQGTFLHLVCKYYKQRQRARDSRLYIMPEYRYDKKLHKYNNTGRFDDDNQLLTYCNHKPRQKRYQLLNDLAGVLQVSPNFLKDKIGSDDDLFISKWLVEHIRGFKKACEDSLKIQKDNRGLLNHKINIARNTKGKCEKEIFNLICKIEGSEDKKGNYKHGLAYELGVLLFGEPNEASKPEFDRKIKKFNSIYSFAQIQQIAFAERKGNANTCAVCSADNAHRMQQIKITEPVEDNKDKIILSAKAQRLPAIPTRIVDGAVKKMATILAKNIVDDNWQNIKQVLSAKHQLHIPIITESNAFEFEPALADVKGKSLKDRRKKALERISPENIFKDKNNRIKEFAKGISAYSGANLTDGDFDGAKEELDHIIPRSHKKYGTLNDEANLICVTRGDNKNKGNRIFCLRDLADNYKLKQFETTDDLEIEKKIADTIWDANKKDFKFGNYRSFINLTPQEQKAFRHALFLADENPIKQAVIRAINNRNRTFVNGTQRYFAEVLANNIYLRAKKENLNTDKISFDYFGIPTIGNGRGIAEIRQLYEKVDSDIQAYAKGDKPQASYSHLIDAMLAFCIAADEHRNDGSIGLEIDKNYSLYPLDKNTGEVFTKDIFSQIKITDNEFSDKKLVRKKAIEGFNTHRQMTRDGIYAENYLPILIHKELNEVRKGYTWKNSEEIKIFKGKKYDIQQLNNLVYCLKFVDKPISIDIQISTLEELRNILTTNNIAATAEYYYINLKTQKLHEYYIENYNTALGYKKYSKEMEFLRSLAYRSERVKIKSIDDVKQVLDKDSNFIIGKITLPFKKEWQRLYREWQNTTIKDDYEFLKSFFNVKSITKLHKKVRKDFSLPISTNEGKFLVKRKTWDNNFIYQILNDSDSRVDGTKPFIPAFDISKNEIVEAIIDSFTSKNIFWLPKNIELQKVDNKNIFAIDTSKWFEVETPSDLRDIGVATIQYKIDNNSRPKVRVKLDYVIDDDSKINYFTNHSLLKSRYPDKVLEILKQSTTIEFESSGFNKTIKEMLGMTLAGIYNETSNN

SEQ ID NO: 435 - protein, 244 aa, Francisella tularensis
ARKQNSEIYNKLMQKILEFKLRKLCTDIKDDKVSTKTLKEITSYEFELLADYLANYSESLKTQKFSYTDKQGNLKELSYYHHDKYNIQEFLKRHATINDEILDTLLTDDFDIWNFNFEKFDFDKNEEKLQNQEDKDHTQAYLHHFVFAVNKIKSEMASGGRHRSQYFQEITNVLDENNHQEGYLKNFCENLHNKKYSNLSVKNLVNLVGNLSNLELKPLRKYFNDKNLIIGMSKSLQKLIATGY

SEQ ID NO: 436 - protein, 501 aa, Francisella tularensis
MEIEKKIADTIWDASKQDFKFGNYRSFINLTPQEQKAFRYALFLADENSIKQAVIRAINNRNRTFVNGTQRYFAEVLANNIYLRAKKENLNTDKISFDYFGIPTIGNGRGIADIRQLYEKVDSDIQAYAKGDKPQASYSHLIDAMIAFCVAADEHRNDGSIGLEIDKNYSLYLLDKNTGEVFTKDIFSQIKITDNEFSDKKLVRKKATEGFNTHRQMTRDGIYAENYLPILIHKELDEVRKGYTWGNSEELKIHKGKKYNIQQLNNIVYCLKFIDKSISIDIQISTLEELRNILTTNNIAATAEYYYINLKNQKLHEYYIENYNTALDYKKYSKEMEFLRSLAYRSERVKIKSIDDVKQVLDKDSNFIIGKITLPFKKEWQRLYLEWQNTTIKDDYEFLKSFFNVKSITKLHKKVRKDFSLPISTNEGKFLVKRKTWDNNFIYQILNDSDSRVDGTKPFIPAFDISKNEIVEAIIDSFTSKNIFWLPKNIELQNVDKIFLL

SEQ ID NO: 437 - protein, 158 aa, Francisella tularensis
MIDFLLELDPCITIPPYLDNNNRKPPKCQSLILNPKFLDNQYPNWQQYLQELKKLQSIQDYLDSFETDLKDLKSSKDQPYFVEYKSSNQQMASGQRDYKDLDARILQFIFDRVKASDELLLNEIYFQAKKLKQKASSELEKLESSKKLDEVIANSQLS

SEQ ID NO: 438 - protein, 878 aa, Francisella tularensis
MLNDLAGVLQVSRNQLLSSVEEWFQQAQRVGEISKSQDEQIFEWLKSFKIASYCKAAVEMQKQYRGTLKNAIQTAIFRQSENINKNKNKNKNTGNQQQALSENSKDVKSLTADEKKLLKLIENIAKASQKIGESLGLNDKQIKKFNSIYNFAQIQQIAFAERKGNANTCAVYSADNAHRMQQIKITELVEDNKDNIILSAKAQRLPAIPTRIVDGAVKKMATILAKNIVDDNWQNIKQVLSAKHQLHIPIITESNAFEFEPALADVKGKSLKDRRKKALERISPENIFKDKNNRIKEFAKGISAYSGANLTDGDFDGAKEELDHIIPRSYKKYGTLNDEVNLICVTRDDNKNKGKRIFCLNDLANNYKLKQFETTDDLEIEKKIADTIWDASKQDFKFGNYRSFINLIPQEQKAFRYALFLADENSIKQAVIRAINNRNRTFVNGTQRYFAEVLANNIYLRAKKENLNTDKISFDYFGIPTIGNGRGIADIRQLYEKVDSDIQAYAKGDKPQASYSHLIDAMIAFCVAADEHRNDGSIGLEIDKNYSLYPLDKNTGEVFTKDIFSQIKITDNEFSDKKLVRKKATEGFNTHRQMTRDGIYAENYLPILIHKELDEVRKGYTWGNSEELKIHKGKKYNIQQLNNIVYCLKFIDKSISIDIQISTLEELRNILTTNNIAATAEYYYINLKNQKLHEYYIENYNTALDYKKYSKEMEFLRSLAYRSERVKIKSIDDVKQVLDKDSNFIIGKITLPFKKEWQRLYLEWQNTTIKDDYEFLKSFFNVKSINKLHKKVRKDFSLPISTNEGKFLVKRKTWDNNFIYQILNDSDSRVDGTKPFIPAFDISKNEIVEAIIDSFTSKNIFWLPKNIELQKVDKIFLL

SEQ ID NO: 439 - protein, 292 aa, Francisella tularensis
MLNDLAGVLQVSRNQLLSSVEEWFQQAQRVGEISKSQDEQIFEWLKSFKIASYCKAAVEMQKQYRGTLKNAIQTAIFRQSENINKNKNKNTGNQQQALSENSKDVKSLTADEKKLLKLIENIAKASQKIGESLGLNDKQIKKFNSIYNFAQIQQIAFAERKGNANTCAVYSADNAHRMQQIKITELVEDNKDNIILSAKAQRLPAIPTRIVDGAVKKMVTILAKNIVDDNWQNIKQVLSAKHQLHIPIITESNAFEFEPALADVKGKSLKDRRKKALERISPENIFKDKNIC

SEQ ID NO: 440 - protein, 53 aa, Francisella tularensis
MNHSLLKSRYPDKVLEILKQSTIIEFESSGFNKTIKEMLGMTLAGIYNETSNN

SEQ ID NO: 441 - protein, 393 aa, Francisella tularensis
MNVKILPIAIDLDVKNTGVFSAFYQKGTSLEKLDNKNGKVYELSKDSYTLLMNNRTAQRHQRRGIDRKQLVKRLFKLVWTEQLNLEWDKDTQQAISFLFNRRGFSFITDGYSTEYLNIVPEQVKAILMDIFDDYNGEDDLDSYLKLATEQESKISEIYNKLMQKILEFKLRKLCTDIKDDKVSTKTLKEITSYEFELLADYLANYSESLKTQKFSYTDKQGNLKELSYYHHDKYNIQEFLKRHATINDEILDTLLTDDFDIWNFNFEKFDFDKNEEKLQNQEDKDHTQAYLHHFVFAVNKIKSEMASGGRHRSQYFQEITNVLDENNHQEGYLKNFCENLHNKKYSNLSVKNLVNLVGNLSNLELKPLRKYFNDKNLIIGMSKSLQKLIATGY

SEQ ID NO: 442 - protein, 1629 aa, Francisella tularensis
MNVKILPIAIDLGVKNTGVFSAFYQKGTSLERLDNKNGKVYELSKDSYTLLMNNRTARRHQRRGIDRKQLVKRLFKLIWTEQLNLEWDKDTQQAISFLFNRRGFSFITDGYSPEYLNIVPEQVKAILMDIFDDYNGEDDLDSYLKLATEQESKISEIYNKLMQKILEFKLRKLCTDIKDDKVSTKTLKEITSYEFELLADYLANYSEILKTQKFSYTDKQGNLKELSYYHHDKYNIQEFLKRHATINDEILDTLLTDDLDIWNFNFEKFDFDKNEEKLQNQEDKDHTQAHLHHFVFAVNKIKSEMASGGRHRGQYFQEITNVLDENNHQEGYLKNFCENLHNKKYSNLSVKNLVNLIGNLSNLELKPLRKYFNDKIHAKADHWDEQKFTETYCHWILGEWRVGVKDQDKKDGAKYSYKDLCNELKQKVTKAGLVDFLLELDPCRTIPPYLDNNNRKPPKCQSLILNPKFLDNQYPNWQQYLQELKKLQSIQNYLESFETDLKVLKSSKDQPYFVEYKSSNQQIASGQRDYKDLDARILQFIFDRVKASDELLLNEIYFQAKKLKQKASSELEKLESSKKLDEVIANSQLSQILKSQHTNGIFEQGTFLHLVCKYYKQRQRARDSRLYIMPEYRYDKKLDKYNNTGRFDDDNQLLTYCNHKPRQKRYQLLNDLAGVLQVSPNFLKDKIGSDDDLFISKWLVEHIRGFKKACEDSLKIQKDNRGLLNHKINIARNTKGKCEKEIFNLICKIEGSEDKKGNYKHGLAYELGVLLFGEPNEASKPEFDRKIKKFNSIYSFAQIQQIAFAERKGNANTCAVCSADNAHRMQQIKITEPVEDNKDKIILSAKAQRLPAIPTRIVDGAVKKMATILAKNIVDDNWQNIKQVLSAKHQLHIPIITESNAFEFEPALADVKGKSIKDRRKKALERISPENIFKDKNNRIKEFAKGISAYSGDNLASGDFDGAKEELDHIIPRSHKKYGTLNDEANLICVTRDDNKNKGNRIFCLHDLANNYKLKQFETTDDLEIEKKIADTIWDASKKDFKFGNYRSFINLTPQEQKAFRHALFLADENPIKQAVIRAINNRNRTFVNGTQRYFAEVLANNIYLRAKKENLNTDKISFDYFGIPTIGNGRGIVEIRQLYEKVDSDIQAYAKGDKPQASYSHLIDAMLAFCIAADEHRNDGSIGLEIDKNYSLYPLDKNTGEVFTKDIFSQIKITNNEFSDKKLVRKKATEGFNTHRQMTRDGIYAENYLPILIHKELDEVRKGYTWGNSEELKIHKGKKYDIQQLNNLVYCLKFIDKSISIDIQISTLEELRNILTTNNIATTAEYYYINLKTQKLHEYYIENYNTALGYKKYTKEMEFLRSLAYRSERVKIKSIDDVKQVLDKDSNFIIGKITLPFKKEWQRLYREWQNTTIKDDYEFLKSFFNVKSITKLHKKVRKDFSLPISTNEGKFLVKRKTWDNNFIYQILNDSDSRVDGTKPFIPAFDISKNEIVEAIIDSFTSKNIFWLPKNIELQKVDNKNIFAIDTSKWFEVETPSDLRDIGVATIQYKIDNNSRPKVRVKLDYVIDDDSKINYFTNHSLLKSRYPDKVLEILKQSTIIEFESSGFNKTIKEMLGMTLAGIYNETSNN

SEQ ID NO: 443 - protein, 285 aa, Francisella tularensis
MTRDGIYAENYLPILIHKELDEVRKGYTWGNSEELKIHKGKKYNIQQLNNIVYCLKFIDKSISIDIQISTLEELRNILTTNNIAATAEYYYINLKNQKLHEYYIENYNTALDYKKYSKEMEFLRSLAYRSERVKIKSIDDVKQVLDKDSNFIIGKITLPFKKEWQRLYLEWQNTTIKDDYEFLKSFFNVKSITKLHKKVRKDFSLPISTNEGKFLVKRKTWDNNFIYQILNDSDSRVDGTKPFIPAFDISKNEIVEAIIDSFTSKNIFWLPKNIELQKVDKIFLL

SEQ ID NO: 444 - protein, 1323 aa, Fructobacillus fructosus
MVYDVGLDIGTGSVGWVALDENGKLARAKGKNLVGVRLFDTAQTAADRRGFRTTRRRLSRRKWRLRLLDELFSAEINEIDSSFFQRLKYSYVHPKDEENKAHYYGGYLFPTEEETKKFHRSYPTIYHLRQELMAQPNKRFDIREIYLAIHHLVKYRGHFLSSQEKITIGSTYNPEDLANAIEVYADEKGLSWELNNPEQLTEIISGEAGYGLNKSMKADEALKLFEFDNNQDKVAIKTLLAGLTGNQIDFAKLFGKDISDKDEAKLWKLKLDDEALEEKSQTILSQLTDEEIELFHAVVQAYDGFVLIGLLNGADSVSAAMVQLYDQHREDRKLLKSLAQKAGLKHKRFSEIYEQLALATDEATIKNGISTARELVEESNLSKEVKEDTLRRLDENEFLPKQRTKANSVIPHQLHLAELQKILQNQGQYYPFLLDTFEKEDGQDNKIEELLRFRIPYYVGPLVTKKDVEHAGGDADNHWVERNEGFEKSRVTPWNFDKVFNRDKAARDFIERLTGNDTYLIGEKTLPQNSLRYQLFTVLNELNNVRVNGKKFDSKTKADLINDLFKARKTVSLSALKDYLKAQGKGDVTITGLADESKFNSSLSSYNDLKKTFDAEYLENEDNQETLEKIIEIQTVFEDSKIASRELSKLPLDDDQVKKLSQTHYTGWGRLSEKLLDSKIIDERGQKVSILDKLKSTSQNFMSIINNDKYGVQAWITEQNTGSSKLTFDEKVNELTTSPANKRGIKQSFAVLNDIKKAMKEEPRRVYLEFAREDQTSVRSVPRYNQLKEKYQSKSLSEEAKVLKKTLDGNKNKMSDDRYFLYFQQQGKDMYTGRPINFERLSQDYDIDHIIPQAFTKDDSLDNRVLVSRPENARKSDSFAYTDEVQKQDGSLWTSLLKSGFINRKKYERLTKAGKYLDGQKTGFIARQLVETRQIIKNVASLIEGEYENSKAVAIRSEITADMRLLVGIKKHREINSFHHAFDALLITAAGQYMQNRYPDRDSTNVYNEFDRYTNDYLKNLRQLSSRDEVRRLKSFGFVVGTMRKGNEDWSEENTSYLRKVMMFKNILTTKKTEKDRGPLNKETIFSPKSGKKLIPLNSKRSDTALYGGYSNVYSAYMTLVRANGKNLLIKIPISIANQIEVGNLKINDYIVNNPAIKKFEKILISKLPLGQLVNEDGNLIYLASNEYRHNAKQLWLSTTDADKIASISENSSDEELLEAYDILTSENVKNRFPFFKKDIDKLSQVRDEFLDSDKRIAVIQTILRGLQIDAAYQAPVKIISKKVSDWHKLQQSGGIKLSDNSEMIYQSATGIFETRVKISDLL

SEQ ID NO: 445 - protein, 1367 aa, Fusobacterium sp.
MKKQKFSDYYLGFDIGTNSVGWCVTDLDYNVLRFNKKDMWGSRLFDEAKTAAERRVQRNSRRRLKRRKWRLNLLEEIFSDEIMKIDSNFFRRLKESSLWLEDKNSKEKFTLFNDDNYKDYDFYKQYPTIFHLRDELIKNPEKKDIRLIYLALHSIFKSRGHFLFEGQNLKEIKNFETLYNNLISFLEDNGINKSIDKDNIKKLEKIICDSGKGLKDKEKEFKEIFNSDKQLVAIFKLSVGSSVSLNDLFDTDEYKKEEVEKEKISFREQIYEDDKPIYYSILGEKIELLDIAKSFYDFMVLNNILSDSNYISEAKVKLYEEHKKDLKNLKYIIRKYNKENYDKLFKDKNENNYPAYIGLNKEKGKKEVVEKSGLKIDDLIKVIKGYLPKPERIEEKDKTIFNEILNKIELKTILPKQRISDNGTLPYQIHEVELEKILENQSKYYDFLNYEENGVSTKDKLLKTFKFRIPYYVGPLNSYHKDKGGNSWIVRKEEGKILPWNFEQKVDIEKSAEEFIKRMTNKCTYLNGEDVIPKDSFLYSEYIILNELNKVQVNDEFLNEENKRKIIDELFKENKKVSEKKFKEYLLVNQIANRTVELKGIKDSFNSNYVSYIKFKDIFGEKLNLDIYKEISEKSILWKCLYGDDKKIFEKKIKNEYGDILNKDEIKKINSFKFNTWGRLSEKLLTGIEFINLETGECYSSVMEALRRTNYNLMELLSSKFTLQESIDNGNKEMNEVSYRDLIEESYVSPSLKRAILQTLKIYEEIKKITGRVPKKVFIEMARGGDETMKNKKIPARQEQLKKLYDSCGNDIANFSIDIKKMKSSLSSYDNNSLRQKKLYLYYLQFGKCMYTGREIDLDRLLQNNDTYDIDHIYPRSKVIKDDSFDNLVLVLKNENAEKSNEYPVKKEIQEKMKSFWRFLKEKNFISDEKYKRLTGKDDFELRGFMARQLVNVRQTTKEVGKILQQIEPEIKIVYSKAEIASSFREMFDFIKVRELNDTHHAKDAYLNIVAGNVYNTKFTEKPYRYLQEIKENYDVKKIYNYDIKNAWDKENSLEIVKKNMKKNTVNITRFIKEEKGQLFDLNPIKKGETSNEIISIKPKLYNGKEEKLNEKYGYYKSLNPAYFLYVEHKEKNKRIKSFERVNLVDVNNIKDEKSLVKYLIENKKLVEPRLIKKVYKRQVILINDYPYSIVALDSNKLMDFENLKPLFLENKYEKILKNVIKFLEDNQGKSEENYKFIYLKKKDRYEKNETLESVKDRYNLEFNEMYDKFLEKLDSKDYKNYINNKKYKNLLDVKEKFIKLNLFDKAFTLKSFLDLFNRKTMADFSKVGLTKYLGKIQKISSNVLSKNELYLLEESVTGLFVKKIKL

SEQ ID NO: 446 - protein, 1367 aa, Fusobacterium sp.
MKKQKFSDYYLGFDIGTNSVGWCVTDLDYNVLRFNKKDMWGSRLFDEAKTAAERRVQRNSRRRLKRRKWRLNLLEEIFSDEIMKIDSNFFRRLKESSLWLEDKNSKEKFTLFNDDNYKDYDFYKQYPTIFHLRDELIKNPEKKDIRLIYLALHSIFKSRGHFLFEGQNLKEIKNFETLYNNLISFLEDNGINKSIDKDNIKKLEKIICDSGKGLKDKEKEFKEIFNSDKQLVAIFKLSVGSSVSLNDLFDTDEYKKEEVEKEKISFREQIYEDDKPIYYSILGEKIELLDIAKSFYDFMVLNNILSDSNYISEAKVKLYEEHKKDLKNLKYIIRKYNKENYDKLFKDKNENNYPAYIGLNKEKGKKEVVEKSGLKIDDLIKVIKGYLPKPERIEEKDKIIFNEILNKIELKTILPKQRISDNGTLPYQIHEVELEKILENQSKYYDFLNYEENGVSTKDKLLKTFKFRIPYYVGPLNSYHKDKGGNSWIVRKEEGKILPWNFEQKVDIEKSAEEFIKRMTNKCTYLNGEDVIPKDSFLYSEYIILNELNKVQVNDEFLNEENKRKIIDELFKENKKVSEKKFKEYLLVNQIANRTVELKGIKDSFNSNYVSYIKFKDIFGEKLNLDIYKEISEKSILWKCLYGDDKKIFEKKIKNEYGDILNKDEIKKINSFKFNTWGRLSEKLLTGIEFINLETGECYSSVMEALRRTNYNLMELLSSKFTLQESIDNGNKEMNEVSYRDLIEESYVSPSLKRAILQTLKIYEEIKKITGRVPKKVFIEMARGGDETMKNKKIPARQEQLKKLYDSCGNDIANFSIDIKKMKSSLSSYDNNSLRQKKLYLYYLQFGKCMYTGREIDLDRLLQNNDTYDIDHIYPRSKVIKDDSFDNLVLVLKNENAEKSNEYPVKKEIQEKMKSFWRFLKEKNFISDEKYKRLTGKDDFELRGFMARQLVNVRQTTKEVGKILQQIEPEIKIVYSKAEIASSFREMFDFIKVRELNDTHHAKDAYLNIVAGNVYNTKFTEKPYRYLQEIKENYDVKKIYNYDIKNAWDKENSLEIVKKNMKKNTVNITRFIKEEKGQLFDLNPIKKGETSNEIISIKPKLYNGKEEKLNEKYGYYKSLNPAYFLYVEHKEKNKRIKSFERVNLVDVNNIKDEKSLVKYLIENKKLVEPRLIKKVYKRQVILINDYPYSIVALDSNKLMDFENLKPLFLENKYEKILKNVIKFLEDNQGKSEENYKFIYLKKKDRYEKNETLESVKDRYNLEFNEMYDKFLEKLDSKDYKNYINNKKYKNLLDVKEKFIKLNLFDKAFTLKSFLDLFNRKTMADFSKVGLTKYLGKIQKISSNVLSKNELYLLEESVTGLFVKKIKL

SEQ ID NO: 447 - protein, 1367 aa, Fusobacterium sp.
MKKQQFSDYYLGFDIGTNSVGWCVTDFNYNVLRFNKKDMWGSRLFDEAKTAAERRVQRNSRRRLKRRKWRLNLLEEIFSDEILKIDSNFFRRLKESSLWLEDKSSKEKFTLFNDDNYKDYDFYKQYPTIFHLRNELIKNPEKKDIRLVYLALHSIFKSRGHFLFEGQNLKDIKNFETLYNNLMAFLEDNDIYKNIDSSYIGNLENIICDSKKGLKDKEKEFKEIFNSDKQLVGFFKLSVGSSVSLNDLFDTDEYKKGEVEKEKISFREQIYEDDKPIYYSILGEKIEFLDIAKSFYDFMVLNNILADSQYISEAKVKLYDEHKRDLKNLKYIIRKYNKENYDKLFKDKNESNYSAYIGLNKEKGKKEVIEKSRLKIDDFAKIIKGYLPKAEKIDEKDRSIFNEILDKIELKTILPKQRISDNGTLPYQIHEAELEKILENQAKYYDFLNHEENGISTKDKLLMTFKFRIPYYVGPLNSYHKNKGGNSWIVRKEEGKILPWNFEQKVDIEKSAEEFIKRMTNKCTYLNGEDVIPKDSFLYSEYIILNELNKVQVNDEFLNKEIKKKIIEDLFKKSKKISEKNFREYLLVNQITNKTVELKGVKDAFNSNYVSYIKFKDIFGDKLNLDIYKEISEKSILWKCLYGDDKKIFEKKIKSVYGDILTKDEIKKINSFKFNTWGRLSEKLLTEIEFIDLETGECYSSVMDALRRTNYNLMELLSSKFTLQENIDNENKEVSEFSYRDLVEESYVSPSLKRAILQTLKIYEEIRKITGRIPKKVFIEMARGGDETMKNKKIPARQEQLKKLYDSCGKDISNFSIDIKEMKNSLNSYDNNSLRQKKLYLYYLQFGKCMYTGKEIDLNRLLQNNDTYDIDHIYPRSKVIKDDSFDNLVLVLKNENAEKSNEYPLKKEIQEKMKSFWKFLKEKNFISDEKYKRLTGKDEFELRGFMARQLVNVRQTTKEAGKILQQIEPEIKIVYSKAEIASSFREMFDFIKVRELNDTHHAKDAYLNIVAGNVYNTKFTEKPYRYLQEIKENYDVKKIYNYDIKNAWDKEKSLEIVKKNMEKNTVNITRFIKEEKGQLFDLNPIRKGETSNEIIAIKPKFYEGSTEKLNEKYGYYKSLNPAYFIYVEHKEKNKIIRSFERVNLVDVNKIKDEKSLIKYLIENKGLIEPKVIKKVYKRQVILINNFPYSIVALDSNKLMDFENLKPLFLERKYEKILKNAIKFLEDNQGKTEEYYKFLYLKKKDRNEKNETIDSVKERYNIEFNEMYDKFLEKLDSKDYKNYINNKKYSELVNVKEKFIKLNLFDKAFTLKSFLDLFNRKTMADFSKVGLTKYLGKIQKISSNVLSKNELHLLEESVTGLFVKKIKL

SEQ ID NO: 448 - protein, 1391 aa, Galbibacter sp.
MKTILGLDLGTNSIGWALVKEAENENEVSDIIKLGVRVNPLTVDELTNFEGGKAYSNNAERTLKRGARRNLQRYKLRRENLIEILLKNGLINKDTALTEVGKETTHQTLKLRSKSANEKVSLEDLAKILLSINKKRGYKSSRKVNAEDDGVAIDGMEVAKLLYDENMTPGEYVLRLLESGKKHLPDFYRSDLQEEFNLVWKKQSEFYPLILTKELFFELHGKNKSQTWAICKEPLGIVGVKLKGSAKEQKFARYRLRKEALTQQIELEHLAIVLQDINNDSNKSSGYLGAISDRSKELFFNKETVGQYQYKQLQKDPNTSLKNQVFYRQDYLDEFEVIWRNQAKFYPQLTNELKQEIRDVVIFYQRKLKSQKNLISFCQFESTQQNYVEKETGKTKIRTIGRRVIPRSSPLFQEFKIWQSLNNLKFVNSESNQIIQFIELEDDVKKVVFDELNLRGDLKPNQVLKILSKYMKIGKLTQWKCNLEEIEGNRTNSALYNVFQMIAEEEGYGFNWGKKSALEIKSELKAIFSSIGINDSILDFDFSKKLDQQLSYQLWHLLYSAEEGNSKITEEDKFTYGNTGVALKKKLHLKFGFKPEYSTLISNLRFTSDYGNLSSKAISKILPFLRDGSDYSKACQYAGYNHSNSLSADELDNRELKPKLELLKKNSLRNPVVEKILNQMVNVVNQVIDNYGKPDEVRIELARELKKSAKERSQMTKNISDATRRNAEIKKYLSKEFGIPNPTKGDVIRYRLWEELASNGYKDLFRDKYIPKEKLFSNEIDIEHIIPKALLFDDSFSNKTLAFKVDNLKKADRTAFDFMSTDFSKDVDSYIGRIETLHKDGKISSSKYKKLMIPKSKLVDGFIERDLRNTQYIAKQARKMLLEVFKTVVPTTGKITDKLREDWDLINVMKELNFPKYKALGLTKKIERFDVGSEKIKSINVIEGWSKRNDHRHHAMDALAVAFTTHNHIQYLNYLNARKDIHHEMHGTIKSIENQIIGKDVMGKRRFIPPISDLRMKAKLQIESILISFKNKNKVVTWSVNKTKLKGKDNYNKRRQLTPRGQLHKETVYGKIKLIDPKPLKLNNKFTLVRASMIVDKVHREIVLQHLSKYDNNSEVAFDSKTIKIDPILIEGIGLKEVVCYEDVFKIRKKISGDNFKNEKHLEKVIDEKVKQILKDRVIKFQGNFKEAFSNLEENPIWLNKSKGIAVKSVAIKGVNNAESLHEGKDHFGDQILDKNKKQIPVDFVSTGNNHHVGIYEDKDGNLQERVVSFFEAVTRVNEGLPIIDKTYNSDIGWKFKFTMKQNEMFVFPSDDFDPNEFDLTDGKNAAKISPNLYRVQKIATKNYMFRHHLETVVTNDLEFTYKSIRSTGWLRNLVKVRINHLGEIVYVGEY

SEQ ID NO: 449 - protein, 1186 aa, Gardnerella vaginalis
MEGNISYAIGIDVGLNSVGLAAIRLDDYGEPIRILKAMSVIHDAGIDPNGAKESDTRKAISGVARRVRRLYRQRRRRLQKLDFLLQSLGWPVVENKDLDFSDSFIPWIFRAKLADEYIADEEQRKQMLSVAIRHIARHRGWRNPYQSIKSMMQETEYSEFYNELLKNIEKLAPGVGCEGSTPAQLVRDYLLSQQGKASRRLRITTGGRRKNHPHSLDPVLPRKLMQSDNMLEILNIFNVQHIDDKYVREQIINAVFYAESPRGSAENRVGKDAITGKGKRALKASLAFQKYRIISTISNLRIRENSKERCLTIEEKQNVYKLLTTSIDKSSKRKSAEAPLYTWIDVADCLGIERYKLRGVGSQIGDGESVGNRPPMLNSELAILYANNKSLGQSLITWWLASNRTQEDKEALIEILSNTVDIEAIHDNPEYQDKYGSAIAFIDSMNETEIAALENISLPDGRAAYSLETLDELNKQMLETDDDLFEARKKLFNLPNNWRPAEAPIAEPTGNPSVDRVLKIVHRFLISAKNRWGNPERINIEHVRSGFQSKKMANSYKELLDKRTEGKENLKAMMRNSLHLGTSDSISDADIRRYEAVQRQNGQCLYCGSEITYHTCELDHIVPRKGPGSTNTRENLVATCSSCNAQKCNTPFATWCEQSTYCKNHDISADSAINRVRAFIFPPNSYDKRGANQFKKEVIARLKQKVGDEAFDNRSIESVAWMANELHRRIDWYYNSQNYQTNNGISDISNKAQTNVGVYAGSLTAIARRMSGIDGKLEFFDGRRKTRFDRRHHAVDASVIAMMTPGIAQILAIKCNLRETQLLQGNKVVPGGIDWKEYPTANDQGYQQYANWSVRMNALLKLLNEEMRADRIAVVNSIRLRYSNSSVHQYEVNALLKLHVGDEIDSETIRRSSTPALYCALTRNPDYDVNNGFPENPGRTILLHNKKLNADDSITFFKAQAVQLFVREGSAKIGNSIHHLRIYEYFEKLKSGKIKKSYGMIRVFQNDLHRHIHEDLFSCDLPEQSISMRYADTKVAHAVQTGNANYLGYLVPGDEIIVDFSHITLSENIGKFVEFLNKIGADCTAYRHWVVVGTDTEKVLILKPSMISSEGIDKLYSNCERNNFDYSSYEKSINEILAGKGWRVSVNVLAQYKAATIRRNALGEVRWASRSHLPISWSWDTGENRE

SEQ ID NO: 450 - protein, 1186 aa, Gardnerella vaginalis
MEGNISYAIGIDVGLNSVGLAAIRLDNNGEPIRILKAMSVIHDAGIDPNGAKESDTRKAISGVARRVRRLYRQRRRRLQKLDFLLHSLGFPVVENKDLDFSDSFIPWIFRAKLADEYIADEKQRKQMLSVAIRHIARHRGWRNPYQSIKSMTQETEYSEFYNELLKNIEKFAPGVGCEGSTPAQLVRDYLLLQQGKASRRLRITTDEKRKNHPNSLNPILPRKLMQSDNMLEILNIFNVQHIDDKYVREQIINAVFYAKSPRGSAENRVGKDAITGKGKRALKASLAFQKYRIISTISNLRIRENSKERCLTIEEKQSVYKLLTTSTDESSKEKSAEAPLYTWIDVADCLGIERYKLRGVGSQIGDGESVGNRPPMLNSELAIIYANNKSLGKSLLTWWLDANRTQEDKEALIEILSNTVDIEAIHDNPEYQDKYGSAIAFIDSMDETEIAALENISLPDGRAAYSLETLDKLNKQMLETDDDLFEARKKLFNLPNNWRPSEAPIAEPTGNPSVDRVLKIVHRFLISAKNRWGNPERINIEHVRSGFKSKKMANSYKELLDKRTKGKENLKAMMRNSLHLGMSDSISDADIRRYEAVQRQNGQCLYCGSEITYHTCELDHIVPRKGPGSTNTRENLVATCSLCNAQKCNTPFSTWCEQSTYCKNHDISVDSAINRVRAFIFPPNSYDKRGANQFKKEVIARLKQKVGDEAFDNRSIESVAWMANELHRRIDWYYNSQNYQTNNGISDITNKAQTNVGVYAGSLTAIARRMSGIDGKLEFFDGRRKTRFDRRHHAVDASVIAMMTPGIAQILAIKCNLRETQLLQGNKVVPGGIDWKEYPTANDQGYQQYANWSVRMNALLKLLNEEMRADRIAVVNSIRLRYNNSSVHQYKVNALLKLHVGDEIDSGTIRRSSTPALYCALTRNPDYDVNNGLPENPNRAILLHDKKLNADDSITFFKAQAVQLFVREGSAEIGSSTHHLRIYEYFKKLKSGKIKKSYGMIRVFQNDLHRHIHEDLFSCDLPEQSISMRYADTEVAHAVQTGNSNYLGYLVPGDEIIVDFSHVKLSGNIGTFVEFLNKIGANCAAYNHWVVVGTDTEKVLILKPSMISSEGIDKLYSNCKRNNFDYSSYEKSINEILVGKGWRVSVNVLAKYNAETIRRNALGEVRWTSRSHLPISWSWNTGENRE

SEQ ID NO: 451 - protein, 1258 aa, Gemella haemolysans
MTEENPDIRKVFLAIHHILKNRGHFLLQGQSFKEGNLNNLIKELLNLDILHISIEITEENINKITEIALEKKTLTDKVNDLKKIYPKEKQLLEAFRLIFGGKTSLDKLFAIDEYKELDASVKSVSFKEKIYEEVRHDYEQVLSNYIELLDLAKLVYDSIILSDIKKEGKTLSESKVELYHKHREDLTKLKTLVKNDSKLSEDKKVELYSAIFKEDKDKGTNYVNYIRKSEEGKGCNYEDFKKFLVKELAKLEESSAKEEILRDLELELFLPLQRTKDNSVVPYQIHKEELVKILDNAAKYHKFLNEKDDSGYSIIEKVIQLLEFRIPYYVGPLNSSKKAKVDGFAWSVRNKGYENTPVTPWNYEKVIDESASAEKFITNLTNKCTYLKGEDVLPKSSLLYSEFALLNELNALKYDGNRISLEARNVIIEKLFKEQGKKVTKTSIKNLLKAEGYIDGKGEITGIDITVKNDLKSYRDFKKILGDKFNTEHVENIILWITLYGESRKLIKAKIEAVYGDIYSKEEIAKMSRLVYKDWGRFSRKLLTELVSKKLYNEETGECLNIIGAMRQNNILFMELLADRFDYSQQIIDYNKELQKEVTEITPEILDDLYVSPSVKRSIWQTVRIVEELKKIIGCAPAKIFVETTRSNQDKKKPTDSRKKQLELFYKAVKKDVKDLEKEIGSLNFDKLNERLSSVEPSKLKAKKLYLYYTQLGRCMYSGETIDITQLNTTAYDIDHIYPQSKVKDDSFTNTVLVKREYNAAKTDRYPLGSDIQTPSNRRFWKFLKEKGLITDEKYNRLVRTEEFSDEELTGFIARQLVETSQSVKAVAGILGELNPKTSICYSKAENVSSFRQNFGKIKEGNRKSDNTEQLIKVREINDYHHAKDAYLNVVVGNVYDTKFTRNVFNFIKDKKDGRKYSLNNVFYENVSNSNNVAWELNKTVHQVEKVMNNNNILVTRRTSEQKGGLFDATVYKAKVAAKAKEGVYYPLKTSDPVVNDVTKYGGFTKVKIAYYSIFEYTLVNKKGEEKITRIIPIPIYVSQNIKDDSTLLEFGKTQINIKSGEEVKDFKLKYRKLCIGDLVKINNFFNFIGGKTNDSFVYDGAVQVTLDTESERYIKTLSKYQNWKKENKDGELWESITKEKNTELYNLLVEKMNSGIFIKKKPNKFNELNSEEIRNNFSSISLEEQAKVLLEVLNLLTNKKSIFDLKSINITAARGKISFNLSNLSQFSIIEQSVAGFYEKEITIIGDKENDMENNNC

SEQ ID NO: 452 - protein, 1054 aa, Haemophilus parainfluenzae
MENKNLNYILGLDLGIASVGWAVVEIDEKENPLRLIDVGVRTFERAEVPKTGESLALSRRLARSARRLTQRRVARLKKAKRLLKSENILLSTDERLPHQVWQLRVEGLDHKLERQEWAAVLLHLIKHRGYLSQRKNESKSENKELGALLSGVDNNHKLLQQATYRSPAELAVKKFEVEEGHIRNQQGAYTHTFSRLDLLAEMELLFSRQQHFGNPFASEKLLENLTALLMWQKPALSGEAILKMLGKCTFEDEYKAAKNTYSAERFVWITKLNNLRIQENGLERALNDNERLALMEQPYDKNRLFYSQVRSILKLSDEAIFKGLRYSGEDKKAIETKAVLMEMKAYHQIRKVLEGNNLKAEWAELKANPTLLDEIGTAFSLYKTDEDISAYLAGKLSQPVLNALLENLSFDKFIQLSLKALYKLLPLMQQGLRYDEACREIYGDHYGKKTEENHHFLPQIPADEIRNPVVLRTLTQARKVINGVVRLYGSPARIHIETGREVGKSYKDRRELEKRQEENRKQRENAIKEFKEYFPHFAGEPKAKDILKMRLYKQQNAKCLYSGKPIELHRLLEKGYVEVDHALPFSRTWDDSFNNKVLVLANENQNKGNLTPFEWLDGKHNSERWRAFKALVETSAFPYAKKQRILSQKLDEKGFIERNLNDTRYVARFLCNFIADNMHLTGEGKRKVFASNGQITALLRSRWGLAKSREDNDRHHALDAVVVACSTVAMQQKITRFVRFEAGDVFTGERIDRETGEIIPLHFPTPWQFFKQEVEIRIFSDNPKLELENRLPDRPQANHEFVQPLFVSRMPTRKMTGQGHMETVKSAKRLNEGISVIKMPLTKLKLKDLELMVNREREKDLYDTLKARLEAFNDDPAKAFAEPFIKKGGAIVKSVRVEQIQKSGVLVREGNGVADNASMVRVDVFTKGGKYFLVPIYTWQVAKGILPNKAATQYKDEEDWEVMDNSATFKFSLHPNDLVKLVTKKKTILGYFNGLNRATGNIDIKEHDLDKSKGKQGIFEGVGIKLALSFEKYQVDELGKNIRLCKPSKRQPVR

SEQ ID NO: 453 - protein, 1052 aa, Haemophilus parainfluenzae]
MKNTSLNYVLGLDLGISSVGWAVVEIDEKENPLSLIDVGVRTFERAETQKGESLALARRLARSARRLTQRRVARLKKAKRLLKSENILLSTDECLPHQVWQLRVEGLERKLERQEWAAVLLHLIKHRGYLSQRKNESKSENKELGALLSGVANNHKLLQQTTYRTPAELAVKKFEVEEGHIRNQQGSYTHTFSRLDLLSEMELLFSRQQHFGNPFTSEKLLENLTALLMWQKPALSGDAILKMLGKCTFENEYKAAKHTYSAERFIWITKLNNLRIQENGLERALNDNERLALMKQPYEKAKLTYAQVRSILNLSDEAIFKGLRYSGEDKKTSETKTVLMEMKAYHQIRLALEKNDLKTEWAELKVNSSLLDEIGTAFSLYKTDEDISTCLAGKLSQPVLNALLENLNFDKFIQLSLKALHKILPLMQQGLRYDEACAEIYGDHYGKKTEENHLLLPQIPADEIRNPVVLRTLTQARKVINGVVRLYSSPARIHIETGREVGKSYQDRRELEKRQEENRKQREKAISEIKTLFPNFSGEPKAKDILKMRLYYQQNAKCLYSGKPLELHRLLEQGYVEIDHALPFSRTWDDSFNNKVLVLANENQNKGNLTPFEWLDGKNNSERWKAFKALVETSAFPYTKKQRILSQKLDEKGFIERNLNDTRYVARFLCNFIADNMHLTGEGKRKVFASNGQITALLRGRWGLAKSREDNDRHHALDAVVVACSTVSMQQKITRFVRFEEGNVFTGERIDRETGEIIPLHFPAPWKFFREEVEIRIFSDNPKLELENRLIARPQANHEFVQPLFVSRMPTRKMIGQGHMETIKSAKRLNEGLSVIKMLLTKLRLKDLESMVNREREKELYEALKARLEAFNDEPAKAFAEPFMKKGGAIVKSVRVEQVQKSGVLVRDGNGVADNASMVRVDVFTKGGKYFLVPIYTWQVAKGILPNKAVIQGKNEEDWEVMDDATFRFSLHQNDLVKLVTKKKTIFGYFNGLNRATGNIDIKEHDLEKSKVKDGIHQSIGIKLALSFEKYQVDELGKNIRLCKSSKRQAVR

SEQ ID NO: 454 - protein, 121 aa, Haemophilus pittmaniae
MLNRRYAAKITRFVRFEAGDVFTGERIDRETGEIIPLHFPTPWQFFKQEVEIRIFSDNPKLELENRLPDRPQANHEFVQPLFVSRMPTRKMTGQGHMETVKSAKRLNEGISVIKMPLTKLN

SEQ ID NO: 455 - protein, 203 aa, Haemophilus pittmaniae
MVNREREKDLYDALKARLEAFNDDPAKAFAEPFIKKGGAIVKSVRVEQVQKSGVLVREGNGVADNASMVRVDVFTKDGKYFLVPIYTWQVAKGILPNKAATQYKDEEDWEVMDNSAIFKFSLHPNDLVKLVTKKKTILGYFNGLDRATGNIAIKEHDLEKSKAKGGIHQGVGIKLALSFEKYQIDELGKNIRLCNPSKCQSVR

SEQ ID NO: 456 - protein, 1052 aa, Haemophilus sputorum
MKNTSLNYVLGLDLGISSVGWAVVEIDEKENPLSLIDVGVRTFERAETQKGESLALARRLARSARRLTQRRVARLKKAKRLLKSENILLSTDECLPHQVWQLRVEGLERKLERQEWAAVLLHLIKHRGYLSQRKNESKSENKELGALLSGVANNHKLLQQTTYRTPAELAVKKFEVEEGHIRNQQGSYTHTFSRLDLLSEMELLFSRQQHFGNPFTSEKLLENLTALLMWQKPALSGDAILKMLGKCTFENEYKAAKHTYSAERFIWITKLNNLRIQENGLERALNDNERLALMKQPYEKAKLTYAQVRSILNLSDEAIFKGLRYSGEDKKTSETKTVLMEMKAYHQIRLALEKNDLKTEWAELKVNSSLLDEIGTAFSLYKTDEDISTCLAGKLSQPVLNALLENLNFDKFIQLSLKALHKILPLMQQGLRYDEACAEIYGDHYGKKTEENHLLLPQIPADEIRNPVVLRTLTQARKVINGVVRLYSSPARIHIETGREVGKSYQDRRELEKRQEENRKQREKAISEIKTLFPNFSGEPKAKDILKMRLYYQQNAKCLYSGKPLELHRLLEQGYVEIDHALPFSRTWDDSFNNKVLVLANENQNKGNLTPFEWLDGKNNSERWKAFKALVETSAFPYTKKQRILSQKLDEKGFIERNLNDTRYVARFLCNFIADNMHLTGEGKRKVFASNGQITALLRGRWGLAKSREDNDRHHALDAVVVACSTVSMQQKITRFVRFEEGNVFTGERIDRETGEIIPLHFPAPWKFFREEVEIRIFSDNPKLELENRLIARPQANHEFVQPLFVSRMPTRKMTGQGHMETIKSAKRLNEGLSVIKMLLTKLRLKDLESMVNREREKELYEALKARLEAFNDEPAKAFAEPFMKKGGAIVKSVRVEQVQKSGVLVRDGNGVADNASMVRVDVFTKGGKYFLVPIYTWQVAKGILPNKAVIQGKNEEDWEVMDDATFRFSLHQNDLVKLVTKKKTIFGYFNGLNRATGNIDIKEHDLEKSKVKDGIHQSIGIKLALSFEKYQVDELGKNIRLCKSSKRQAVR

SEQ ID NO: 457 - protein, 1338 aa, Helcococcus kunzii
MQDYYLGLDIGTNSVGWAVTDENYNLLRKKGKDLWGVRLFKEAQPATERRGHRSSRRRTIRKSLRKQLLRELFEEEINAIDKDFFLRLDESKYWLEDKKIEGKYSLFNDENFTDKDYYEKFPTIFHLRKALIESDDKEDIRLYFLAINQMMKRRGHFLIDGKLSNVEDITPFKECIQNLINEELDTEIETEFYDKAIKIVSDYSLKKTEKKNLIKDLVKETDSIEDSKKIINIFNLLISGKSKVNGIFDDEEILEKIKEDNKEDFYLTSEKYEENLEYFSQLLDYRFELISSLKSIYDYIILQEVLKGKKYLSYAQVERYKNHKEDLRKLKQLIKKYDKNGKIYYQIFRDENFKKGYVAYLGYYKKNKKNVPVKKCDYDTFSKNIKSTLDKICDKEDPLYIELIDKIEKGGFLLKQIVSTNSVIPHQVHELELDKILENLEKNYPSFKEISDGVSKIDKIKMIFNFRIPYYVGPLNDYHKDKVNSNTWIVKNEGFENENIRPWNFSKIVDEHACEEEFIKRMINECSYIPGEKVLPKSSLLYSEYMVLNELNNLRVNGDKLNPKIKKEIVENIYKKERKVTLKKIRNFLIINNYVDSKVEFSGLSDGIKANMSSYIDFAEILDDNFDNNMVEDLIEQITIHVGNVKLLTEKISNKYPNLEKKQINKIVNLKFKDWARFSRKLLVGIEGTEKETGEINTIIGFLRETNENFMELMSNRYTFSEEISEIKKKYIPNKLSKQIVDDLYVSPAVKKMIWQVLNINDELIKVLGKQPKKIFIEMARGKEEKPEVKDSRKNKLIELYKNLGKEGKEWLNRIEDKTEADFRNRALYLYYTQMGRCMYTGEIIDIERLYDKELYDLDHIIPRKMKKDDSIHKNLVLVTRNSNQYEKKDNYPVPEVIKSRENVRHLWYALKKKGLITEEKYNRLTRINPLSDKELSEFIERQLVETRQTTKVVKDLFENYYTDSKIVTVKAGLVSELRRDFEVLKCREINDLNHAHDAFLNIIVGDVWSKKFTSNPYNFVKKNREKYTLNNIFTKNQKDLRGNEIWNCAEGKKRIIKTLNKPSVLFSVENFEQTGQLFDQNIIGKQDYKEKTSYVPIKGDERLQDISKYGGYRGISGAYFFIVEHTEKNKRVKTIESLPIYMKSYVEENGLLDFCTNEMKLVDPKIIVKKLNYKSEIIVDGFKYLISGKTENRLSLETNEYLYWNHTQTTDIKKILNINEKIELEKYNGDIESERENIIKYIQIILEKFKLKPFIKRRNLPNIEINFADYETEKLLQLLVNLIPLTTKYVSPVDLTVISGSKYAGKVLIPKKISNLNEVIFISKSITGIYESRRRII

SEQ ID NO: 458 - protein, 1023 aa, Helicobacter cinaedi
MKIYSFDIGVASIGWAFIENEVLQDCGIRIFTKAENPKNGASLALPRREARGVRKRLARRRGRLNTIKQLLCKEFGLQLEDYLSNDGELPKAYTASKANPLKSPYELRTLALSQKLDSKDLVRVILHIAKHRGYGNKHAKDSKDTESGKVKKAIEFNRKTLAEKGYRSVGEYLYREFFQQSRISQNNGATEFINVRNKAGNYEHCVAQDMLKEELESILNAQRQFGFSLKQDFENKLLTKIFEQRPLKSFADKVGNCCFIAGEKRTPKDSLSAIEFIALSRTINTLINLSKESGEIYNRAIILQIVESTLKKGEISYKELREIIRLDERLRFKDPRLDYSREIKEAEKVKFLEFKQLKGFKKALGESFTTLARSQLDEIAEHIALIKDRVKLNEKLESYALTKEQREALSNLSFSAHINLSLQALKQILPFMRGDNGEQCLDYDESVEKAGLKALSKDTLKGQMLPPLNEFEPYLSNPVVARALAEYRKVLNALLKQYGSPHKIHIEYAREAKLSSTERQKYEKEQKDNYAANQAAHKKCQELGLEPSSTNLLKLKLWQEQGGLCLYSGAKITISYLQDPTALQVDHIYPYSRSFDDSYMNKCLVLTKANQEKGNRTPFEAFGTDSAKWGVITTLAQKLPHKKRRRILNTAFNDKEAGFKLRNLNDTSYIARLVADYTETYLEFLPLVESENTTLGKGQKGSKKHIAIVNGALTSTMRYYLGFASKDRDNHLHHALDAVIIGFMNDSVIKAFSDFKKTQETSKAAYYAHTLSKQEYKKQRAFIQLPSGENFRASVLEKVESVFVSKPPRKRVRGALHEATFYSPNDPKLLKNYGGTKGVERALALGKMRKVGAKIVSNGAMVRVDIFRHKSSGKFYGVPVYTMDFALGILPNKAVVVGKDKNGVIKDWLEMDSSYEFIFSLYKDDLLLVQKKEMAEPELCYFMSFNSSIAQISVAKHDNNFSTLTKNQKLLFSNATQEDVSGKSIGIQNLQVFEKWQVSVLGEVKRTQSYPRENISLASKAKK

SEQ ID NO: 459 - protein, 1023 aa, Helicobacter cinaedi
MKIYSFDIGVASIGWAFIENEVLQDCGIRIFTKAENPKNGASLALPRREARGVRKRLARRRGRLNTIKQLLCKEFGLQLEDYLSNDGELPKAYTASKANPLKSPYELRTLALSQKLDSKDLVRVILHIAKHRGYGNKHAKDSKDTESGKVKKAIEFNRKTLAEKGYRSVGEYLYREFFQQSRISQNNGATEFINVRNKAGNYEHCVAQDMLKEELESILNAQRQFGFSLKQDFESKLLTKIFEQRPLKSFADKVGNCCFIAGEKRAPKDSPSAIEFIALSRTINTLINLSKESGEIYNRAIILQIVESTLKKGEISYKELREIIRLDERLRFKDPRLDYSREIKEAEKVKFLEFKQLKGFKKALGESFTTLAISQLDEIAEHIALIKDRVKLNEKLESYALTKEQREALSNLSFSAHINLSLQALKQILPFMRGDNGEQCLDYDESVEKAGLKALSKDTLKGQMLPPLNEFEPYLSNPVVARALAEYRKVLNVLLKQYGSPHKIHIEYAREAKLSSTERQKYEKEQKDNYAANQAAHKKCQELGLEPSSTNLLKLKLWQEQGGLCLYSGAKITISYLQDPTALQVDHIYPYSRSFDDSYMNKCLVLTKANQEKGNRTPFEAFGTDSAKWGVITTLAQKLPHKKRRRILNTAFNDKEAGFKLRNLNDTSYIARLVADYTETYLEFLPLVESENTTLSKGQKGSKKHIAIVNGVLTSTMRYYLGFASKDRDNHLHHALDAVIIGFMNDSVIKAFSDFKKTQETSKAAYYAHTLSKQEYKKQRAFIQLPSGENFRVSVLEKVESVFVSKPPRKRVRGALHEATFYSPNDPKLLKNYGGTKGVERALALGKMRKVGAKIVSNGAMVRVDIFRHKSSGKFYGVPVYTMDFALGILPNKAVVVGKDQNGVIKDWLEMDSSYEFIFSLYKDDVILVQKKEMQRPELCYFVSFDTSGASIKVAKHDNNFSTLTENQKLLFSNATKEEVVGKSIGIQNLKVFEKWQVSVLGEVKRTQSYPRENISLASKAKK

SEQ ID NO: 460 - protein, 344 aa, Helicobacter pullorum
MKILGFDIGIASIGWAFVENGELKDCGVRIFTKAENPKTGDSLAMPRREARSVRRRLARRKGRLETLKRLLAKEWDLCYEDYIAADGELPKAFMGKNLTNPYVLRYEALQRLLSKEELVRVVLHIAKHRGYGNKNAKITKSEESKREQGKILSALATNASVIARYRTVGEYFYKEFCEVIKNPQGLNTNENCTQPKVRVLKPIRNKGGEYTNCILQEDLQRELRCIFEHQKGFGFSITQEFQDKILKIAFYQRSLKDFSHLVGKCTFYPDEPRAPKFSLSAIEFITKAKAINLLASIAKESGEVWDKEQWRERLDSVFSAVCERGINTIPSSSHFLNIFDILYL

SEQ ID NO: 461 - protein, 1688 aa, Ignavibacterium album
MEFKKVLGLDIGTNSIGCALLSLPKSIQDYGKGGRLEWLTSRVIPLDADYMKAFIDGKNGLPQVITPAGKRRQKRGSRRLKHRYKLRRSRLIRVFKTLNWLPEDFPLDNPKRIKETISTEGKFSFRISDYVPISDESYREFYREFGYPENEIEQVIEEINFRRKTKGKNKNPMIKLLPEDWVVYYLRKKALIKPTTKEELIRIIYLFNQRRGFKSSRKDLTETAILDYDEFAKRLAEKEKYSAENYETKFVSITKVKEVVELKTDGRKGKKRFKVILEDSRIEPYEIERKEKPDWEGKEYTFLVTQKLEKGKFKQNKPDLPKEEDWALCTTALDNRMGSKHPGEFFFDELLKAFKEKRGYKIRQYPVNRWRYKKELEFIWTKQCQLNPELNNLNINKEILRKLATVLYPSQSKFFGPKIKEFENSDVLHIISEDIIYYQRDLKSQKSLISECRYEKRKGIDGEIYGLKCIPKSSPLYQEFRIWQDIHNIKVIRKESEVNGKKKINIDETQLYINENIKEKLFELFNSKDSLSEKDILELISLNIINSGIKISKKEEETTHRINLFANRKELKGNETKSRYRKVFKKLGFDGEYILNHPSKLNRLWHSDYSNDYADKEKTEKSILSSLGWKNRNGKWEKSKNYDVFNLPLEVAKAIANLPPLKKEYGSYSALAIRKMLVVMRDGKYWQHPDQIAKDQENTSLMLFDKNLIQLTNNQRKVLNKYLLTLAEVQKRSTLIKQKLNEIEHNPYKLELVSDQDLEKQVLKSFLEKKNESDYLKGLKTYQAGYLIYGKHSEKDVPIVNSPDELGEYIRKKLPNNSLRNPIVEQVIRETIFIVRDVWKSFGIIDEIHIELGRELKNNSEERKKTSESQEKNFQEKERARKLLKELLNSSNFEHYDENGNKIFSSFTVNPNPDSPLDIEKFRIWKNQSGLTDEELNKKLKDEKIPTEIEVKKYILWLTQKCRSPYTGKIIPLSKLFDSNVYEIEHIIPRSKMKNDSTNNLVICELGVNKAKGDRLAANFISESNGKCKFGEVEYTLLKYGDYLQYCKDTFKYQKAKYKNLLATEPPEDFIERQINDTRYIGRKLAELLTPVVKDSKNIIFTIGSITSELKITWGLNGVWKDILRPRFKRLESIINKKLIFQDEDDPNKYHFDLSINPQLDKEGLKRLDHRHHALDATIIAATTREHVRYLNSLNAADNDEEKREYFLSLCNHKIRDFKLPWENFTSEVKSKLLSCVVSYKESKPILSDPFNKYLKWEYKNGKWQKVFAIQIKNDRWKAVRRSMFKEPIGTVWIKKIKEVSLKEAIKIQAIWEEVKNDPVRKKKEKYIYDDYAQKVIAKIVQELGLSSSMRKQDDEKLNKFINEAKVSAGVNKNLNTTNKTIYNLEGRFYEKIKVAEYVLYKAKRMPLNKKEYIEKLSLQKMFNDLPNFILEKSILDNYPEILKELESDNKYIIEPHKKNNPVNRLLLEHILEYHNNPKEAFSTEGLEKLNKKAINKIGKPIKYITRLDGDINEEEIFRGAVFETDKGSNVYFVMYENNQTKDREFLKPNPSISVLKAIEHKNKIDFFAPNRLGFSRIILSPGDLVYVPTNDQYVLIKDNSSNETIINWDDNEFISNRIYQVKKFTGNSCYFLKNDIASLILSYSASNGVGEFGSQNISEYSVDDPPIRIKDVCIKIRVDRLGNVRPL

SEQ ID NO: 462 - protein, 1354 aa, Indibacter alkaliphilus
MKKILGLDLGTTSIGWAFIKEPEKDVVGSEIVDMGVRIVPLSSDEENDFAKGNTISINADRTLKRGARRNLQRFKQRRNALLETFKEKNLIPSNFQYAEDGPSSTFSTLKLRDKAAKEKIELDDFVKVLLQINKKRGYKSSRKAMSEEDEGTAIDSMGIAKELYENDLTPGQWVYEALKNGRKNVPDFYRSDLQEEFKKIVNYQSEFYPDILNTSFVEDWMGKASTPTKQYFNKRGVQLAENKGKREERRLQEYKWRAEAVNFKIDLSEIALILSQINSQISNSSGYLGAISDRSKELYFKNLTVGQYLYQQVKKNPHTRLKGQVFYRQDYLDEFEKIWSVQSSFYPQLNDELKQEVRDVTIFFQRRLKSQKHLISNCEFEEHHKVVPKSHPIFQEFRIWQNLNNLTLIKKDNLNEKCELALEDKTALANELAFKKELSVKDALKVLGLKPSDWEFNFTKIEGNRTNHAFFEAFAKIIELEDGEPIDLGNLKADDILDQFSEAFLRIGIDTELLQVNSDIEGAEYEKQSYIQFWHLLYSSEDDQKLKQNLIRKFGFKPEHAKILASISLQDDHASLSSRAIKKILPHLQSGLIYDKACTYAGYNHSSSFTKDENEKRELRAELELLKKNSLRNPVVEKILNQMINVVNAILKDPNLGRPDEIRVEMARELKANAEQRKNMTSNIASATRDHEKYREILKKEFGLKRVTKNDLLRYKLWLETDGISLYTGKPIEASKLFSKEYDIEHIIPKARLFDDSFSNKTICERQLNIDKANVTAFSFLQNKLSADEFEQYQSRVKSLYGKLSKAKIQKLLMANDKIPEDFIARQLQETRYISKKAKEILFEITMRVSVTTGTITDKLREDWGLVEIMKELNWEKYDKLGLTYTIEGKHGERLNKIKDWNKRNDHRHHAMDALTVALTKPAYIQYLNNLNAKAIGNKKGTEIFAIEQKYLKRENGKLCFIPPIENIRAEAKKHLSKILVSYKAKNKVVTINKNKTKKKAGFNEQTALTPRGQLHKETVYGKSFHYSTKFEKIGASFDAQKINTVAKKEEREALLKRLAENGNDPKKAFTGKNSLNKMPIYLDLGKNIKLSEKVKTVVLEQNYTIRKNIDPDLKVDKVIDVGIKRILESRLEEFGGNAKLAFSNLEENPIWLNKEKGIPIKRVKISGVSNVESLHVKKDHFGEKILDEEGNEIPVDFVSTGNNHHVAIYEDEDGNLQDEVVNFYEAVIRRNQGESIIKYRHEEGWNFLYSIKQNEFFVFPSQDFNPNDFDLLDPKNYDLISPNLYRAQKFSKVMYGNSAVRDYVFRHHLETVLNDVKELKDVAYKQLKSLQYLNGIKKVRLNHLGQIIQVGEY

SEQ ID NO: 463 - protein, 1397 aa, Joostella marina
MKKVLGLDLGTNSIGWALVNEATKEEKKEGKSSEIIKLGVRVNPLTVDEKTNFEKGRPLSTNADRTLKRSARRNLQRYKLRRRNLIEILIKNGFITKDTPLTETGKDTTHQTLKLRAKSAKEKVDLKDFAKILLTINKKRGYKSSRKVNSDEDGLAIDGMAVAKHLYEQNLTPGQYVLNLLQKNKKYVPDFYRSDLQEEFKNIWNNQKTYYFDILTDTLFEELKDKNKSQTWAICKKPFDIAGIKQIGKASDKRLERYKWRTEGLTQKLNLEYLAIALQEINNDINKSSGYLGAISDRSKELFFNKETVGENLYRQLVKTPHTSLRNQVFYRQDYLDEFETIWETQAKFYPQLTHTLKEEIRDVIIFYQRKLKSQKSLISFCQFESWEQTYIEKETGKSKTRTVGRKVIPKSSPLFQEFKIWQNLNSLEFRNSDEGEIIEFIKLDEDIRQTVFEELNLRGNLKPNDVLKILGNYISLGKVSQWKCNFEEIEGNRTNAALYNVYQIIAENEGYGFDWAKKTASEINKELKNIFPQLGIDASILDFDFTQANFDKQTSYQLWHLLYSAEEDFKISEEDKVLYGNSSVSLKKKLHQKYGFKPEYTKLLTNISLQPDYGNLSAKAICNILPYLKENNVYSEACDLTGYNHSNFLTAEEQAKRPLKPILELLKKNSLRNPVVEKILNQMVNVVNQVIETYGKPDEIRIELTRELKKSAKERANMTKSIADATRRNDDYRKTIIKEFGIPNPTKSDVVRYRLWQELASRGYKDIFTDTEIKPQELFSNKIDIEHIIPKALLFDDSFSNKTLAFKKDNLKKANRTAYDFIANDYAPNLENYIERVESLHKDRKITRAKRNKLLMLQSKLPDGFIERDLRNSQYITKEAKKMLYEVCRTVVSTSGSITDKLREDWDLINVMKELNFPKYKALGLTEKIERYDIGAEKMKEVEIIEDWNKRNDHRHHAIDALTVAFSTHSHIQYLNHLNARRDEGHKKHAAIIAIESTITEKEGNKKRRFIAPLPNFRLQAKEHIESILVSFKNKNKVVTNNINKTKRIKKDKFNTKVQLTPRGQLHKETIYGKIKQPLEKHIKLNKSFTLEQAKLIIDKRQREKVLNHLEKYAHNSDIAFNSKTLKKNPLLISDEPLKEVLCFEEVFTIRKDISYDNFKNEKQLDKVIDEKVKQALKERINQYNGDFREAFSDIERNPIWLNKAKGICVKRATIKGVSNAEPLHTAKNHLGEEVLTENKEQIPVDYVSTGNNHHVAIYEDEDGNLQEKVVSFYEAVIRVNEGLPIIDKEYNKSLGWTFKFTMKQNEMFVFPSEDFNPTEIDLLDQKNASLISPNLFRVQKFTIKDYFFRHHLETTVENNNTLKNTTWRREGLSGIYGIIKIRLNHLGEIVQVGEY

SEQ ID NO: 464 - protein, 1060 aa, Kingella kingae
MAAKSLNYILGLDLGIASCGWAVVEMDEQENPLRLIDVGVRTFEEAENPKDGSSLAETRRLARAQRRLISRRANRMNKLCRLLKQENVLQANDYDEKGLIIGLPNQAWELRAQGLDRKLEPKEWAAVLIHLVKHRGYLSQRKNESQTADKELGALLSGMNHNHQLLQSQSNQYRTPAELAIKQFATQDGHIRNQRGAYTHTFNRLDLQNELNQLFDAQTRLGNPHVSGSLKTAINDLLMNQKAALSGDAILEMLGRCTFEPSEYKAAKNTYSAERFVWLGKLTNLRIQDNGLESALSREQRELLLNEPYNKTKLTYQQVRKLLRLPETAFFKGLRYGKDNAESATFMEMKSYHAIRKSLENKSLKSEWEKLKTQPKLLDLIGTAFSIYKTDDEIAGCLKNQLPENVIIALQGQLNFSNFMELSLKALEKLLPLMEQGLRYDEACTQIYGNRHEKIADKTEKFLPNIPADKLRNPVVLRTLTQARKVINAIIRRYGSPARVHIETGREVGKSFSDRDKLKKQQEENQEQRRRAIDEWKQFFPNAAHEPKAVDILKLRLYQLQQGKCLYSGLPIDVRRLPEKGYVEIDHALPFSRTWDDSFNNKILVLASENQNKGNQTPYEYLRGADNSESWRLFVENVQNCQFSPNKKQKIMAKQLDEKGFLERNLNDTRYVSRFLCQFISEHLHLTGKGKKRVFASNGQITALLRGRWGLSKNREENDRHHAVDAVVVACSTVAMQQKITQFVRYQKGNVFTGERIDKETGEVISIHFPTPWEHFREEVMIRVFDDNPLRTLPEKLPNRPEALHEYVMPLFVSRMPTRKMTGQGHKETIKSAKRLDEKISVLRVPLTQLKLNDLENMVNREREPALYEALKARLEQFKNDPAKAFAEPFFKQGGQQVKAVRVEIVQKSGMLLRKINGVADNGSMVRVDVFEKSGKFYLVPIYAWQVAEGILPNYAVVAHKDESDWILMDESYHFKFALYKNDLLEVQTKKGGIMGYFASLDRATGAITIREHDRDKKKCKDGEHRSIGVKMASSFKKLQVDELGKNIHETRSRKRPNIG

SEQ ID NO: 465 - protein, 1314 aa, Lactobacillus animalis
MLKKDYSIGLDIGTNSVGHAVVTDDYKVPTKKMKVFGDTSKKTIKKNMLGVLLFNEGQTAADTRLKRGTRRRYTRRKNRLRYLQEIFAPELAKVDPNFLYRLEESSLVAEDKKYDVYPIFGKREEELLYHDTYKTIYHLRSALANNDQPADLRLVYLALAHIIKYRGNFLLEGEIDLRTTDINKVFAEFSETLNENSDENLGKLDVADIFKNNTFSKTKKSEELLKLSGAKKNQLAHQLFKMMVGNMGSFKKVLGTDEEHKLSFGKDTYEDDLNDLLAEAGDQYLDIFVAAKKVYDAAILASILDVKDTQTKTVFSQAMIERYEEHQKDLIELKRVFKKYLPEKCHDFFSEPKISGYAGYIDGKVSEEDFYKYTKKTLKGIPETEEILQKIDANNYLRKQRTFDNGAIPHQVHLKELVAIVENQGKYYPFLRENKDKFEKILNFRIPYYVGPLARGNSKFAWLTRAGEGKITPYNFDEMIDKETSAEDFIKHMTINDLYLPTEPVLPKHSLLYERYTIFNELAGVRYVTENGEAKYFDAQTKRSIFELFKLDRKVSEKMVIKHLKVVMPAIRIQALKGLDNGKFNASYGTYKDLVDMGVAPELLNDEVNSEKWEDIIKTLTIFEGRKLIKRRLENYRDFLGEDILRKLSRKKYTGWGRLSAKLLDGIYDKKTHKTILDCLMTEDYSQNFMQLINDDNYSFKETIKNAQVIEKEETLAKTVQELPGSPAIKKGILQSLEIVDEIIKVMGYKPKSIVVEMARETQKTHGTRKREDRVQQIVENLKDANELPEKLPSNAELSDERKYLYCLQNGRDMYTGAPLDYDHLQFYDVDHIIPQSFLKDDSIENKVLTIKKENVRKTNGLPSEAVIQKMGSFWKKLLDAGAMTNKKYDNLRRNLHGGLNEKLKERFIERQLVETRQITKYVAQLLDQRLNYDGNGVELDEKIAIVTLKAQLASQFRSEFKLRKVRALNNLHHAHDAYLNAIVANLIMAKYPELEPEFVYGKYRKAKFKGLGKATAKNTLYANVLYFLKENEVYPFWDKARDLPTIKRYLYRAQVNKVRKAERQIGGFSDEMLVPKSDSGKLLPRKEGLDPVKYGGYAKAVESYAVLITADEVKKGKTKKVKTLVNIPIIDSKKYEADPTAYLASRGYTNVTNSFILPKYSLLEDPEGRRRYLASFKEFQKANELILPQHLVELLYWVNAKDGEQKLEDHKAEFKELFDKIMEFADKYVVAPKNSEKIRRLYEENQDATPMELGKNFVELLRYTADGAASDFKFFGENIPRKRYNSAGSLLNGTLIYQSKTGLYETRIDLGKL

SEQ ID NO: 466 - protein, 1371 aa, Lactobacillus buchneri
MKVNNYHIGLDIGTSSIGWVAIGKDGKPLRVKGKTAIGARLFQEGNPAADRRMFRTTRRRLSRRKWRLKLLEEIFDPYITPVDSTFFARLKQSNLSPKDSRKEFKGSMLFPDLTDMQYHKNYPTIYHLRHALMTQDKKFDIRMVYLAIHHIVKYRGNFLNSTPVDSFKASKVDFVDQFKKLNELYAAINPEESFKINLANSEDIGHQFLDPSIRKFDKKKQIPKIVPVMMNDKVTDRLNGKIASEIIHAILGYKAKLDVVLQCTPVDSKPWALKFDDEDIDAKLEKILPEMDENQQSIVAILQNLYSQVTLNQIVPNGMSLSESMIEKYNDHHDHLKLYKKLIDQLADPKKKAVLKKAYSQYVGDDGKVIEQAEFWSSVKKNLDDSELSKQIMDLIDAEKFMPKQRTSQNGVIPHQLHQRELDEIIEHQSKYYPWLVEINPNKHDLHLAKYKIEQLVAFRVPYYVGPMITPKDQAESAETVFSWMERKGTETGQITPWNFDEKVDRKASANRFIKRMTTKDTYLIGEDVLPDESLLYEKFKVLNELNMVRVNGKLLKVADKQAIFQDLFENYKHVSVKKLQNYIKAKTGLPSDPEISGLSDPEHFNNSLGTYNDFKKLFGSKVDEPDLQDDFEKIVEWSTVFEDKKILREKLNEITWLSDQQKDVLESSRYQGWGRLSKKLLTGIVNDQGERIIDKLWNTNKNFMQIQSDDDFAKRIHEANADQMQAVDVEDVLADAYTSPQNKKAIRQVVKVVDDIQKAMGGVAPKYISIEFTRSEDRNPRRTISRQRQLENTLKDTAKSLAKSINPELLSELDNAAKSKKGLTDRLYLYFTQLGKDIYTGEPINIDELNKYDIDHILPQAFIKDNSLDNRVLVLTAVNNGKSDNVPLRMFGAKMGHFWKQLAEAGLISKRKLKNLQTDPDTISKYAMHGFIRRQLVETSQVIKLVANILGDKYRNDDTKIIEITARMNHQMRDEFGFIKNREINDYHHAFDAYLTAFLGRYLYHRYIKLRPYFVYGDFKKFREDKVTMRNFNFLHDLTDDTQEKIADAETGEVIWDRENSIQQLKDVYHYKFMLISHEVYTLRGAMFNQTVYPASDAGKRKLIPVKADRPVNVYGGYSGSADAYMAIVRIHNKKGDKYRVVGVPMRALDRLDAAKNVSDADFDRALKDVLAPQLTKTKKSRKTGEITQVIEDFEIVLGKVMYRQLMIDGDKKFMLGSSTYQYNAKQLVLSDQSVKTLASKGRLDPLQESMDYNNVYTEILDKVNQYFSLYDMNKFRHKLNLGFSKFISFPNHNVLDGNTKVSSGKREILQEILNGLHANPTFGNLKDVGITTPFGQLQQPNGILLSDETKIRYQSPTGLFERTVSLKDL

SEQ ID NO: 467 - protein, 315 aa, Lactobacillus casei
MFKDYLKQLEDDGTAKAIRQLYDRYIDGDDAKPFVREDFVKALTKEVTAHPNAKSPELLERLAQPDFMLKQRNKANGAIPVQMQQRELDQIIKNQSVYYDWLAAPNPVEKHRKSMPYQLDELLNFRIPYYVGPLVTAKEQKAARGGVFAWMVRKDPDGNITPYNFDEKVDREASANTFIQRMKTTDTYLIGEDVLPKQSLLYQSYEVLNELNNVRVNDNKLSFDQKQQVLGELFERHNTVTIKQFVDNLLAHGDYDRIPEVRGLADEKRFLSSLSTYNQLKGILHEAIDDSDKQTDMVDCKINPNAVRTKKISFL

SEQ ID NO: 468 - protein, 236 aa, Lactobacillus casei
MFKDYLKQLEDDGTAKAIRQLYDRYIDGDDAKPFVREDFVKALTKEVTAHPNAKSPELLERLAQPDFMLKQRNKANGAIPVQMQQRELDQIIKNQSVYYDWLAAPNPVEKHRKSMPYQLDELLNFRIPYYVGPLVTAKEQKAARGGVFAWMVRKDPDGNITPYNFDEKVDREASANTFIQRMKTTDTYLIGEDVLPKQSLLYQSYEVLNELNNVRVNDNKLSSSIFKSSATMITNS

SEQ ID NO: 469 - protein, 1389 aa, Lactobacillus casei
MIIRTYELKTITTIAILKMFQLLTGGLSMTKLGKPYGIGVDIGSNSIGFAAVDENSHLIRLKGKTVIGARLFEEGKAAADRRASRTTRRRLSRNRWRLSFLRDFFESHITPTGPNFFMRQKYSEISPKDKARYKYEKRLFNDRTDAEFYQQYPTMYHLRNRLLTDPSKADVREIYFAIHHILKSRGHFLTSGYAKDFNTNKVALNEIFPALQDAYAQVYPDLDITFDENKVNEFKTVLLNEKATPSDTQRALVNLLLAEDGDKDILKQQKQVLTEFAKAVVGLKTKLNVALGTEVDSSEATVWNFSLGQLDDKWAGIESAMTDEGTEILDQIRDLYRARLLNGIVPAGKTLSQAKVDDYAQHHEDLELFKDYLKQLEDDGTAKAIRQLYDRYIDGDDAKPFVREDFVKALTKEVTAHPNAKSPELLERLAQPDFMLKQRNKANGAIPVQMQQRELDQIIKNQSVYYDWLAAPNPVEKHRKSMPYQLDELLNFRIPYYVGPLVTAKEQKAAQGGVFAWMVRKDPDGNITPYNFDEKVDREASANTFIQRMKTTDTYLIGEDVLPKQSLLYQRYEVLNELNNVRVNNEKLSIEQKQQVIRELFERHNSVTIKQFAENLRAHGDYAHIPEIRGLADEKRFLSSLSTYRQLKSLLPDAIDDPAKQADIENIIAWSTVFEDAAIFKTKLKEINWLDSQTITKLSNIRYRGWGQFSHKFLNGLTLGNGHTIIQELFLSNNNLMQILTDETLQKKMTELNADKLKAANINDAIDDAYTSPSNKKALRQVLRVIEDIKRAADGQDPSWLYVETADGGGTPGKRTRARQHQLQEIYANAAHELIDSAVRGELEDKIADKADFNDRLVLYFMQGGRDIYTGTPLNIDQLSSYDIDHILPQSLIKDNSLDNRVLVHAIINREKNATFASTIYAQKMNATWRQWHEAGLISGRKLRNLQMRPDQIDKYASGFVARQLVETRQIIKLTEQIVAAQYPETKIIAVKAGLSHQLREELEFPKNRDVNHYHHAFDAFLAARIGTYLLKRFPNLQAFFTYGKFKKADVKKLRGFNFIRDITHAEDKIVVKDTGEVIWDKKRDVDELDRIYNFKRMLITHEVHFEKADLFKQTVYGAKDSKEAGGKKQLISKKKGYPVDIYGGYTQETGSYLSVVRLTKKAMYAVVKVSTRDAAKLAVAKSISEQKENETLNDIIDEKLSKISKNGKITHELFEVVLPRVGQKTLFKNSKYNLFLVNSDTYMHNYQELWMPREYQKMWKDISLSKYGDAQTEDQLDQIFGFIVSQVNSYFNLYDINQFRKKLNDAADKFATLPMRDTDDMQGKIATIGQLLIGLQANAARSDLRNLDIKTPLGLLQIPNGISLDSDTSVVYQSPTGLLEREVHLSDL

SEQ ID NO: 470 - protein, 412 aa, Lactobacillus casei
MIKDNSLDNRVLVHPLVNREKDTIFASTRFAKQTNGMWRQWHAAGLISSRKLRNLQMRPDEIDKYASGFVARQLVETRQIIKLTEQIVADQYPDTKIIAVKAGLSSQLRKELDFPKNREVNHYHHAFDAFLAARIGTYLLKRYPNLEPFFTYGKFKKTEVKKLKSFNFIRDMTHAKDKIVAKETGEIVWDNASDINELDRIYNFKRMLITHEVRFETASLFKQTLYAAKNPKNRGGSRQLIPKKKGYLVDIYGGYTQETGSYLSVVRLTKKAMYAVVKVSTRDAAKLAVAKSISEQKENETLKKIIDGKLSKTSKKGKTTHQLFEIVLPRVGQKTLFKNSKYNQFLVNSDTYMHNYQELWMPREYQRMWKDILLSNHGDAQIEGQLDQIFKFIVSQVNSYFNLYDINQFRKK

SEQ ID NO: 471 - protein, 234 aa, Lactobacillus casei
MKVTKKTETIFKVVKIATSQVAALNKARSRSTAEELSVLTELLKPKFSKVGKNGKITDTPFEVVLPRVPREQLFYNAKYGFFMVNSDTMFHNFQEIWVSRSDQKILQQIRKAKIDYPNVDQDLDNLFHNLADQIVKYFDLYSIAGFKEKISQSQNTFNDLAVDDTDQSVGKITVINELLKGAQANGMTGSLKVLKISTPFGFTQDKSGVLTKDSSIIYQSPTGLFERSVRLTDL

SEQ ID NO: 472 - protein, 566 aa, Lactobacillus casei
MQILTDEVLKQKIAELNAHELKASGIYAAIDDAYTSPSNKKALRQVLSVIDDITNAAGQAPNWLYIETADGDGVPGKRTNSRQRKIQEIYVNAAQELITSSVRGELEDKIASRADFTDRLVLYFMQGGRDIYTGEPLNIDNLSSYDIDHILPQSLIKDNSLDNRVLVHPLVNREKDTIFASTRFAKQMNGMWRQWHAAGLISSRKLRNLQMRPDEIDKYASGFVARQLVETRQIIKLTEQIVADQYPDAKIIAVKAGLSSQLRKELDFPKNREVNHYHHAFDAFLAARIGTYLLKRYPNLEPFFTYGKFKKTEVKKLKSFNFIRDMTHAKDKIVAKETGEIVWDNASDINELDRIYNFKRMLITHEVRFETASLFKQTLYAAKNSKNRGGSRQLIPKKKGYLVDIYGGYTQETGSYLSVVRLTKKAMYAVVKVSTRDAAKLAVAKSISEQKENETLKKIIDGKLSKTSKKGKTTHQLFEIVLPRVGQKTLFKNSKYNQFLVNSDTYMHNYQELWMPREYQRMWKDILLSNHGDAQLEGQLDQIFKFIVSQVNSYFNLYDINQFRKK

SEQ ID NO: 473 - protein, 1363 aa, Lactobacillus casei
MTKLGKPYGIGVDIGSNSIGFAAVDENSHLIRLKGKTVIGARLFEEGKAAADRRASRTTRRRLSRNRWRLSFLRDFFESHITPTDPNFFMRQKYSEISPKDKARYKYEKRLFNDRTDAEFYQQYPTMYHLRNRLLTDPSKADVREIYFAIHHILKSRGHFLTSGYAKDFNTNKVALNEIFPALQDAYAQVYPDLDITFDENKVNEFKTVLLDEKATPSDTQRALVNLLLAEDGDKDILKQQKQVLTEFAKAVVGLKMKLNVALGTEVDSSEATAWNFSLGQLDDKWAGIESAMTDEGTEILDQIRDLYRARLLNGIVPAGKTLSQAKVDDYEQHHEDLELFKDYLKQLEDDGMAKVIRQLYDRYIDGDDAKPFVREDFVKALTKEVTAHPNAKSPELLERLVQPDFMLKQRNKANGAIPVQMQQRELDQIIKNQSVYYDWLAAPNPVEKHRQSMPYQLDELLNFRIPYYVGPLVTAKEQKAAQGGVFAWMVRKDPDGNITPYNFDEKVDREASANTFIQRMKTTDTYLIGEDVLPKQSLLYQSYEVLNELNNVRVNDNKLSFDQKQQVLGELFERHNTVTIKQFVDNLLAHGDYDRIPEVRGLADEKRFLSSLSTYNQLKGILHEAIDDSDKQTDIEKIIAWSTIFEDKAIFKTKLNEISWLTAGMINSLANIRYRGWGQFSHKLLNELTLSTGRTVFEELLISSHNLMQILTDEVLKQKIAELNAHELKASGIYAAIDDAYTSPSNKKALRQVLSVIDDITNAAGQAPNWLYIETADGDGVPGKRTNSRQRKIQEIYANAAQELITGSVRGELEDKIASRADFTDRLVLYFMQGGRDIYTGEPLNIDNLSSYDIDHILPQSLIKDNSLDNRVLVHPLVNREKDTIFASTRFAKQMNGMWRQWHAAGLISSRKLRNLQMRPDEIDKYASGFVARQLVETRQIIKLTEQIVADQYPDAKIIAVKAGLSSQLRKELDFPKNREVNHYHHAFDAFLAARIGTYLLKRYPNLEPFFTYGKFKKTEVKKLKSLKSFNFIRDMTHAKDKIVAKETGEIVWDNASDINELDRIYNFKRMLITHEVRFETASLFKQTLYAAKNSKNRGGSRQLIPKKKGYLVDIYGGYTQETGSYLSVVRLTKKAMYAVVKVSTRDAAKLAVAKSISEQKENETLKKIIDGKLSKTSKKGKTTHQLFEIVLPRVGQKTLFKNSKYNQFLVNSDTYMHNYQELWMPREYQRMWKDILLSNHGDAQLEGQLDQIFKFIVSQVNSYFNLYDINQFRKKIADATDKFAKLPTHDTDNARGKIATIGQLLIGLQANAMRSDLRNLDIKTPFGLLQIGTGITLDLDTSIIYQSPTGLFEREVPLTDL

SEQ ID NO: 474 - protein, 1360 aa, Lactobacillus casei
MTKLGKPYGIGVDIGSNSIGFAAVDENSHLIRLKGKTVIGARLFEEGKAAADRRASRTTRRRLSRNRWRLSFLRDFFESHITPTDPNFFMRQKYSEISPKDKARYKYEKRLFNDRTDAEFYQQYPTMYHLRTRLLTDPSKADVREIYFAIHHILKSRGHFLTPGYAKDFNTNKVALNEIFPALQDAYAQVYPDLDITFDENKVNEFKTVLLNEKATPSDTQRALVNLLLAEDGDKDILKQQKQVLTEFAKAVVGLKTKLNVALGTEVDSSEATVWNFSLGQLDDKWAGIESAMTDEGTEILDQIRDLYRARLLNGIVPAGKTLSQAKVDDYAQHHEDLELFKDYLKQLEDDGTAKAIRQLYDRYIDGDDAKPFVREDFVKALTKEVTAHPNAKSPELLERLAQPDFMLKQRNKANGAIPVQMQQRELDQIIKNQSVYYDWLAAPNPVEKHRKSMPYQLDELLNFRIPYYVGPLVTAKEQKAAQGGVFAWMVRKDPDGNITPYNFDEKVDREASANTFIQRMKTTDTYLIGEDVLPKQSLLYQSYEVLNELNNVRVNDNKLSFDQKQQVLGELFERHNTVTIKQFVDNLLAHGDYDRIPEVRGLADEKRFLSSLSTYNQLKGILHEAIDDADKQTDIENIIAWSTIFEDKAIFKTKLNEISWLNAGMINSLANIRYRGWGQFSHKLLNELTLSTGRTVFEELLISSRNLMQILTDEVLKQKIAELNAHELKASGIYAAIDDAYTSPSNKKALRQVLSVIDDITNAAGQAPNWLYIETADGDGVPGKRTNSRQRKIQEIYANAAQELITGSVRGELEDKIASRADFTDRLVLYFMQGGRDIYTGEPLNIDNLSSYDIDHILPQSLIKDNSLDNRVLVHPLVNREKDTIFASTRFAKQMNGMWRQWHAAGLISSRKLRNLQMRPDEIDKYASGFVARQLVETRQIIKLTEQIVADQYPDTKIIAVKAGLSSQLRKELDFPKNREVNHYHHAFDAFLAARIGTYLLKRYPNLEPFFTYGKFKKTEVKKLKSFNFIRDMTHAKDKIVAKETGEIVWDNASDINELDRIYNFKRMLITHEVRFETASLFKQTLYAAKNSKNRGGSRQLIPKKKGYLVDIYGGYTQETGSYLSVVRLTKKAMYAVVKVSTRDAAKLAVAKSISEQKENETLKKIIDGKLSKTSKKGKTTHQLFEIVLPRVGQKTLFKNSKYNQFLVNSDTYMHNYQELWMPREYQRMWKDILLSNHGDAQLEGQLDQIFKFIVSQVNSYFNLYDINQFRKKIADATDKFAKLPTHDTDNARGKIATIGQLLIGLQANAMRSDLRNLDIKTPFGLLQIGTGITLDLDTSIIYQSPTGLFEREVPLTDL

SEQ ID NO: 475 - protein, 700 aa, Lactobacillus casei
MTKLGKPYGIGVDIGSNSIGFAAVDENSHLIRLKGKTVIGARLFEEGKAAADRRASRTTRRRLSRNRWRLSFLRDFFESHITPTDPNFFMRQKYSEISPKDKARYKYEKRLFNDRTDAEFYQQYPTMYHLRTRLLTDPSKADVREIYFAIHHILKSRGHFLTSGYAKDFNTNKVALNEIFPALQDAYAQVYPDLDITFDENKVNEFKTVLLDEKATPSDTQRALVNLLLAEDGDKDILKQQKQVLTEFAKAVVGLKTKLNVALGTEVDSSEATAWNFSLGQLDDKWAGIESAMTDEGTEILDQIRDLYRARLLNGIVPAGKTLSQAKVDDYEQHHEDLELFKDYLKQLEDDGMAKAIRQLYDRYIDGDDAKPFVREDFVKALTKEVTAHPNAKSPELLERLVQPDFMLKQRNKANGAIPVQMQQRELDQIIKNQSVYYDWLAAPNPVEKHRQSMPYQLDELLNFRIPYYVGPLVTAKEQKAAQGGVFAWMVRKDPDGNITPYNFDEKVDREASANTFIQRMKTTDTYLIGEDVLPKQSLLYQSYEVLNELNNVRVNDNKLSFDQKQQVLGELFERHNTVTIKQFVDNLLAHGDYDRIPEVRGLADEKRFLSSLSTYNQLKGILHEAIDDSDKQTDIEKIIAWSTIFEDKAIFKTKLNEISWLNAGMINSLANIRYRGWGQFSHKLLNELTLSTGRTVFEA

SEQ ID NO: 476 - protein, 330 aa, Lactobacillus casei
MTKLGKPYGIGVDIGSNSIGFAAVDENSHLIRLKGKTVIGARLFEEGKAAADRRASRTTRRRLSRNRWRLSFLRDFFESHITPTDPNFFMRQKYSEISPKDKNRYKYEKRLFNDRTDAEFYQQYPTMYHLRNRLLTDPSKADVREIYFAIHHILKSRGHFLTPGDAKDFNTNKVALNEIFPALQDAYAQVYPDLDITFDENKMNEFKTVLLNEKATPSDTQRALVNLLLAEDGDKDILKQQKQVLTEFAKAVVGLKTKLNVALGTEVDSSEATAWNFSLGQLDDKWAGIESAMTDEGTEILDQIRDLYRARLLNGIVPAGKTLSQAKVDD

SEQ ID NO: 477 - protein, 330 aa, Lactobacillus casei
MTKLGKPYGIGVDIGSNSIGFAAVDENSHLIRLKGKTVIGARLFEEGKAAADRRASRTTRRRLSRNRWRLSFLRDFFESHITPTDPNFFMRQKYSEISPKDKNRYKYEKRLFNDRTDAEFYQQYPTMYHLRNRLLTDPSKADVREIYFAIHHILKSRGHFLTPGDAKDFNTNKVALNEIFPALQDAYAQVYPDLDITFDENKMNEFKTVLLNEKATPSDTQRALVNLLLAEDGDKDILKQQKQVLTEFAKAVVGLKTKLNVALGTEVDSSEATAWNFSLGQLDDKWAGIESAMTDEGTEILDQIRDLYRARLLNGIVPAGKTLSHAKVDD

SEQ ID NO: 478 - protein, 1361 aa, Lactobacillus casei
MTKLGKPYGIGVDIGSNSIGFAAVDENSHLIRLKGKTVIGARLFEEGKAAADRRASRTTRRRLSRNRWRLSFLRDFFESHITPTGPNFFMRQKYSEISPKDKARYKYEKRLFNDRTDAEFYQQYPTMYHLRNRLLTDPSKADVREIYFAIHHILKSRGHFLTSGYAKDFNTNKVALNEIFPALQDAYAQVYPDLDITFDENKVNEFKTVLLNEKATPSDTQRALVNLLLAEDGDKDILKQQKQVLTEFAKAVVGLKTKLNVALGTEVDSSEATVWNFSLGQLDDKWAGIESAMTDEGTEILDQIRDLYRARLLNGIVPAGNTLSQAKVDDYAQHHEDLELFKDYLKQLEDDGTAKAIRQLYDRYIDGDDAKPFVREDFVKALTKEVTAHPNAKSPELLERLAQPDFMLKQRNKANGAIPVQMQQRELDQIIKNQSVYYDWLAAPNPVEKHRKSMPYQLDELLNFRIPYYVGPLVTAKEQKAAQGGVFAWMVRKDPDGNITPYNFDEKVDREASANTFIQRMKTTDTYLIGEDVLPKQSLLYQRYEVLNELNNVRVNNEKLSIEQKQQVIRELFERHNSVTIKQFAENLRAHGDYAHIPEIRGLADEKRFLSSLSTYRQLKSLLPDAIDDPAKQADIENIIAWSTVFEDAAIFKTKLKEINWLDSQTITKLSNIRYRGWGQFSHKFLNGLTLGNGHTIIQELFLSNNNLMQILTDETLQKKMTELNADKLKAANINDAIDDAYTSPSNKKALRQVLRVIEDIKRAADGQDPSWLYVETADGGGTPGKRTRARQHQLQEIYANAAHELIDSAVRGELEDKIADKADFNDRLVLYFMQGGRDIYTGTPLNIDQLSSYDIDHILPQSLIKDNSLDNRVLVHAIINREKNATFASTIYAQKMNATWRQWHEAGLISGRKLRNLQMRPDQIDKYASGFVARQLVETRQIIKLTEQIVAAQYPETKIIAVKAGLSHQLREELEFPKNRDVNHYHHAFDAFLAARIGTYLLKRFPNLQAFFTYGKFKKADVKKLRGFNFIRDITHAEDKIVVKDTGEVIWDKKRDVDELDRIYNFKRMLITHEVHFEKADLFKQTVYGAKDSKEAGGKKQLISKKKGYPVDIYGGYTQETGSYLSVVRLTKKAMYAVVKVSTRDAAKLAVAKSISEQKENETLNDIIDEKLSKISKNGKITHELFEVVLPRVGQKTLFKNSKYNLFLVNSDTYMHNYQELWMPREYQKMWKDISLSKYGDAQTEDQLDQIFGFIVSQVNSYFNLYDINQFRKKLNDAADKFATLPMRDTDDMQGKIATIGQLLIGLQANAARSDLRNLDIKTPLGLLQIPNGISLDSDTSVVYQSPTGLLEREVHLSDL

SEQ ID NO: 479 - protein, 1128 aa, Lactobacillus casei
MTKLGKPYGIGVDIGSNSIGFAAVDENSHLIRLKGKTVIGARLFEEGKAAAKRRAGRTTRRRLSRNRWRLSFLRDFFESHITPTDPNFFMRQKYSEISPKDKARYKYEKRLFNDRTDAEFYQQYSTMYHLRNRLMTDPSRADVREIYFAIHHILKSRGHFLTPGDAKDFNTNDVALDEIFPALQDAYAQVYPDLGITFDEDKANEFKTILLNEIATSIDTQRALVKLLLAEEDDKDILKQQKQVLTEFAKAVVGLKTKLNLALGTEVDSSEATAWNFSLGQLDDKWAGIESAMTDEGTEILDQIRDLYRARLLNGIVPTGKTLSQAKVDDYTQHHEDLQLFKAYLKQLEDDGTAKAIRQLYDRYIDGDDAAPFLRENFVKALTKDVTAHPNTKSPELLERLAQPDFMLKQRNKANGAIPVQMQQRELDQIIKNQAVYYDWLAAPNPVEKHRKSMPYQLDELLNFRIPYYVGPLVTAKEQKAAQGGVFAWMVRKDPEGNITPYNFDEKVDREASANTFIQRMKTTDTYLIGEDVLPKQSLLYQRYEVLNELNNVRVNNEKLSIEQKQQVIRELFERHNSVTIKQFAENLRAHGDYAHIPEIRGLADEKRFLSSLSTYRQLKSLLPEAIDDPAKQADIENIIAWSTVFEDAAIFKTKLKEISWLGSEAITKLSNIRYRGWGQFSRKFLNGLTLGNGHTIIQELLLSTNNLMQILTDETLQKKMTELNADKLKTANINDAIDNAYTSPSNKKALRQVLRVVDDIKRAADGQDPSWLYVETADGGGTPGKRTRARQHQLQEIYANAAHELIDTAVRGELEDKISDKADFNDRLVLYFMQGGRDIYTGAPLNIDQLSSYDIDHILPQSLIKDNSLDNRVLVHAIINREKNATFASTIYAQKMNATWRQWHEAGLISGRKLRNLQMRPDQIDKYASGFVARQLVETRQIIKLTEQIVAAQYPDTKIIAVKAGLSHQLREELEFPKNRDVNHYHHAFDAFLAARIGTYLLKRFPNLQAFFTYGKFTKADVKKLRGFNFIRDITHAEDKIVAKDTGEVVWDKQRDVDELDRIYNFKRMLITHEVRFETADLFKQTVYGARDSKEAGGSKQLIPKKKDIQLIFMGAISERTRPILPL

SEQ ID NO: 480 - protein, 1366 aa, Lactobacillus casei
MTKLGKPYGIGVDIGSNSIGFAAVDENSHLIRLKGKTVIGARLFEEGKAAAYRRASRTTRRRLSRNRWRLSFLRDFFESHITPTDPNFFMRQKYSEISPKDKARYKYEKRLFNDRTDAEFYQQYPTMYHLRTRLLTDPSKADVREIYFAIHHILKSRGHFLTPGYAKDFNTNKVALNEIFPALQDAYAQVYPDLDITFDENKVNEFKTVLLNEKATPSDTQRALVNLLLAKEGDRDILKQQKQVLTEFAKAVVGLKTKLNVALGTEVDSSEATAWNFSLGQLDDKWAGIESAMTDEGTEILDQIRDLYRARLLNGIVPAGKTLSQAKVDDYAQHHEDLELFKDYLKQLEDDGTAKAIRQLYDRYIDGDDAKPFVREDFVKALTKEVTAHPNAKSPELLERLAQPDFMLKQRNKANGAIPVQMQQRELDQIIKNQAVYYDWLAAPNPVEKHRQSMTYQLDELLNFRIPYYVGPLVTAKEQKAAQGGVFAWMVRKDPDGNITPYNFDEKVDREASANTFIQRMKTTDTYLIGEDVLPKQSLLYQSYEVLNELNNVRVNDNKLSFDQKQQVLGELFERHNTVTIKQFVDNLLAHGDYDRIPEVRGLADEKRFLSSLSTYNQLKGILHEAIDDADKQTDIENIIAWSTIFEDKAIFKTKLNEISWLNAGMINSLANIRYRGWGQFSHKLLNELTLSTGRTVFEELLISSRNLMQILTDEVLKQKIAELNAHELKASGIYAAIDDAYTSPSNKKALRQVLSVIDDITNAAGQAPNWLYIETADGDGVPGKRTNSRQRKIQEIYANAAQELITGSVRGEFEDKIASRADFTDRLVLYFMQGGRDIYTGEPLNIDNLSSYDIDHILPQSLIKDNSLDNRVLVHPLVNREKDTIFASTRFAKQMNGMWRQWHAAGLISSRKLRNLQMRPDEIDKYASGFVARQLVETRQIIKLTEQIVADQYPDTKIIAVKAGLSSQLRKELDFPKNREVNHYHHAFDAFLAARIGTYLLKRYPNLEPFFTYGKFKKTEVKKLKSLKSLKSFNFIRDMTHAKDKIVAKETGEIVWDNASDINELDRIYNFKRMLITHEVRFETASLFKQTLYAAKNSKNRGGSRQLIPKKKGYLVDIYGGYTQETGSYLSVVRLTKKAMYAVVKVSTRDAAKLAVAKSISEQKENETLKKIIDGKLSKTSKKGKTTHQLFEIVLPRVGQKTLFKNSKYNQFLVNSDTYMHNYQELWMPREYQRMWKDILLSNHGDAQIEGQLDQIFKFIVSQVNSYFNLYDINQFRKKIADATDKFAKLPTHDTDNARGKIATIGQLLIGLQANAMRSDLRNLDIKTPFGLLQIGTGITLDLDTSIIYQSPTGLFEREVPLTDL

SEQ ID NO: 481 - protein, 1354 aa, Lactobacillus coryniformis
MTLHYNVGLDIGTNSVGYTIVDDNGKILQVKGKNGYGVRVFKEGATAAERRIFRTTHRRLKRRKWRLRLLQDFFEPYILPQDDGFFIRRKESNLVLNDRDEDTASLFNDRSDRDFYQAYPTIYHLRQALMTEKRQFDVREIYLAMHHIIKYRGHFLLNGTVNNFTNNKIDLHSDFEELNALLLNVIPELKFQIDLDHSTMFQTTLLNTTISRSGRQRDLVKSFYNGSDDKQLAKQQKSVATELLKAILGLKAKFHKLFNLDLLETTEWEFSFDAEDIDDKLAKLEPLMTENQQQVMDILQRIFAAITLNGIVPEGKTLSASKVDSYQKHKQDLKLLKAIAQHSDKKTATVLQTAYNEYINGIASKPLKQEDFYKRLTNAVKKSSDPQVADMLALIDQEKFLPKQRTKENGAIPHQLHQLELERIIDNQKDYYPWLAELNPNQARQKVAKYKLSELVAFRVPYYVGPLIEPEVQQATSNAHFAWMARKEAGPITPWNFDQKVDRNVSAERFIKRMTTKDTYLLAEDVLPLHSLLYQRFIVLNELNNVRVNGQKLTKKQKQAVYQDLFKRQPHVTKKQFKSYLVQTGEFAESSKIEGLANETSFNSGLTTENELRKIFGAQLDEARYQVDFEQIIEWATLFEDAKILRTKLAEITWLTTEQIEKLAGIRYRGWGRFSRKLLAGLRDQNGQQIIDLLWDTPNNFMVIVSQAAFSEAITKENEKLIDRRGAQDVITDLYTSPQNKKALRQVLAIVADVQKAMGGVPPQRIFIEFAREDEKNPRRSVERSRQLEKLYQTISNEFLINSEVRQELKEAVDQKVNFKDRLFLYFLQGGVDLYSGKRINIDQLSHYDIDHILPQSFIKDDSLDNRVLVSQKLNRSKSDSVPLSEFANYKFGPAMQAKWLQLKEAGLLSKRKYDNLTLDPTKLSKFAPLGFVNRQLVETRQVIKLAANLLASEETKVVTIKANMTHQVRKELDFPKNRNVNNYHHAFDAYLTAFVGIFLSKRYPKLKPYFTYGDFQKGNKLPDLKNFNFLYELKNKDRSIDSNTGEIIWDKQRDLAYMNKIYNFKKVTVVHEVLTKSGALYNQTLYKASEDKASGRGTKQLIRKKDNMPTELYGGYTGSTSAFMSIVRLWKKDKPYYKVVGIPTRMAAKLANQAQLLDYLTKKFTTRKLVKKTGDYKTTVERFELVVPKVGFNQLVIDGGQPFMLGSATYQYNARELFISKEAVKALNKQLSTHVDLVQVFDEILVQVNRWFPLYDTNGFREKLSHGRDRFMKLNDSFEEKSDTQIDVLNRILIGFHANAARTNLKILGLGTDLGFMTQQAGIRLTEKAILVHQSPSGLFERKVALRDLKGLR

SEQ ID NO: 482 - protein, 544 aa, Lactobacillus crispatus
KYYLYFMQLGRDAYTGKPINIDEVSQYYDIDHILPQSFIKDDSLNNRVLVAKPINNGKSDGVPLKLFGDNLATGLGITVKQMWNNWADKGLINKAKQNNLFLDPENINKHQASGFIRKQLVETSQIIKLATTILQAEYPKTKIIVVKASSNHYLRNEFDLYKSREVNDYHHAIDAYLTTICGNLLYQAYPKLRPFFVYGQFKKFSSDPKKENEILKKTKNFDFVAKLLGSKAPNEIRSQQGKVLFEKNKIRLQLNKAYNYKYMLVSRDTTTKNQEMFGMTIYPRAERDIAKSRKLIEKRKGFSTDIYGGYTGTAAAYMAIVRINKTKSSQYKVIAVPMTKRAILNKAEKEGNYEKILKQILSPSILYNDKGKRKAGVISFDIIKGKVPYNQVVQDGNKKFLLKSAIYLCNAKQLVLSEEAMRVITGHWLDSDKQDQELLDVYDEILEKIDRYLPLFDIRDFRNKLHKGREKFLKLNAEDKFKAIIQILKGLHDNSDTGELKDIGITVPFGQLQNNSGITLSSDTILVYQSPTGLFEKRVKISSL

SEQ ID NO: 483 - protein, 298 aa, Lactobacillus crispatus
MDELNKISVNGKKLSVSVKQELYEDLFKKNNTVSAKQLKNWLIENQKLPYIKIKGLADQTKFNSSLSTYIKLKKSGLFVDKLDSNEFRDDFEKIIEWSTIFEDKQIYIQKLQTIDWLTAKQIQFLQNIRLQGWGRLSKKLLTAIVDSNGQNIIEQLWNSQQIFMSIVNKADIKGTITDANQDLMHSNSMEDILSEAYTSPANKKMIRQVVKVVHDIQKAASGQAPKQIAIEFARESRRNSKLSQTRGHKLQDIYQKISGDIVNKNLKDKLAEYIKNNQLSVWEKTSFQMNKNDQDFLF

SEQ ID NO: 484 - protein, 279 aa, Lactobacillus crispatus
MNGKKLSVSVKQELYEDLFKKNNTVSAKQLKNWLIENQKLPYIKIKGLADQTKFNSSLSTYIKLKKSGLFVDKLDSNEFRDDFEKIIEWSTIFEDKQIYIQKLQTIDWLTAKQIQFLQNIRLQGWGRLSKKLLTAIVDSNGQNIIEQLWNSQQIFMSIVNKADIKGTITDANQDLMHSNSMEDILSEAYTSPANKKMIRQVVKVVHDIQKAASGQAPKQIAIEFARESRRNSKLSQTRGHKLQDIYQKISGDIVNKNLKDKLAEYIKNNQLNKDKYYTR

SEQ ID NO: 485 - protein, 538 aa, Lactobacillus crispatus
MQLGRDAYTGKPINIDEVSQYYDIDHILPQSFIKDDSLNNRVLVAKPINNGKSDGVPLKLFGDNLATGLGITVKQMWNNWADKGLINKAKQNNLFLDPENINKHQASGFIRKQLVETSQIIKLATTILQAEYPKTKIIVVKASSNHYLRNEFDLYKSREVNDYHHAIDAYLTTICGNLLYQAYPKLRPFFVYGQFKKFSSDPKKENEILKKTKNFDFVAKLLGSKAPNEIRSQQGKVLFEKNKIRLQLNKAYNYKYMLVSRDTTTKNQEMFGMTIYPRAERDIAKSRKLIEKRKGFSTDIYGGYTGTAAAYMAIVRINKTKSSQYKVIAVPMTKRAILNKAEKEGNYEKILKQILSPSILYNDKGKRKAGVISFDIIKGKVPYNQVVQDGNKKFLLKSAIYLCNAKQLVLSEEAMRVITGHWLDSDKQDQELLDVYDEILEKIDRYLPLFDIRDFRNKLHKGREKFLKLNAEDKFKAIIQILKGLHDNSDTGELKDIGITVPFGQLQNNSGITLSSDTILVYQSPTGLFEKRVKISSL

SEQ ID NO: 486 - protein, 206 aa, Lactobacillus crispatus
MQLGRDAYTGKPINIDEVSQYYDIDHILPQSFIKDDSLNNRVLVAKPINNGKSDGVPLKLFGDNLATGLGITVKQMWNNWADKGLINKAKQNNLFLDPENINKHQASGFIRKQLVETSQIIKLATTILQAEYPKTKIIVVKASSNHYLRNEFDLYKSREVNDYHHAIDAYLTTICGNLLYQAYPKLRPFFVYGQFKKFSSDPKKRK

SEQ ID NO: 487 - protein, 857 aa, Lactobacillus crispatus
MTKLNNEYMVGLDIGTNSCGWVATDFDNNILKMHGKRALGSHLFDEGVSAADRRAFRTTRRRIKRRKWRLKLLEEIFDEEMAKVDPNFFARLKESGLSPLDTRKNVSSIVFPTKKMDKQFYKKFPTIYHLRNALMKQDKKFDLRAIYIAIHHIVKYRGNFLSNSSISNFSASKIEIDRFVNELNDLYSIFLPESGVIFDAGNASKVEDIIRNEQMFKLDKIKEIADVLPDTENKSGLKLSKKISKEISKAILGYKAKFEIILQVNVDKTDSSIWNFKLNDENADVNLSEITSDLTDTQLQILDLVRNLFSAISLLNIVDEGSTLSESMIRKYNDHAQDLKLLKTVIKNHSDRKKAHNLQLAYDKYVNNRHFVDVETKKAFPNKHLYRKSDFYEIVKKNLDASKEAVQIRKEIALDKFMPKQRSDENGVIPFQLNQIELDKIIENQGKYYPFLKEINPIKAHRMQAPYKLDELIRFRVPYYVGPMIEPTNSSYPQTRQNQSFAWMVRKAKGRITPWNFDEKVDRQKSANNFIKRLTTKDTYLFGEDVLPANSLLYQKYTVLDELNKISVNGKKLSVSVKQELYEDLFKKNNTVSAKQLKNWLIENQKLPYIKIKGLADQTKFNSSLSTYIKLKKSGLFVDKLDSNEFRDDFEKIIEWSTIFEDKQIYIQKLQTIDWLTAKQIQFLQNIRLQGWGRLSKKLLTAIVDSNGQNIIEQLWNSQQIFMSIVNKADIKGTITDANQDLMHSNSMEDILSEAYTSPANKKMIRQVVKVVHDIQKAASGQAPKQIAIEFARESRRNSKLSQTRGHKLQDIYQKISGDIVNKNLKDKLAEYIKNNQLSVWEKTSFQMNKNDQDFLF

SEQ ID NO: 488 - protein, 857 aa, Lactobacillus crispatus
MTKLNNEYMVGLDIGTNSCGWVATDFDNNILKMHGKRALGSHLFDEGVSAADRRAFRTTRRRIKRRKWRLKLLEEIFDEEMAKVDPNFFARLKESGLSPLDTRKNVSSIVFPTKKMDKQFYKKFPTIYHLRNALMKQDKKFDLRAIYIAIHHIVKYRGNFLSNSSISNFSASKIEIDRFVNELNDLYSIFLPESGVIFDAGNASKVEDIIRNEQMFKLDKIKEIADVLPDTENKSGLKLSKKISKEISKAILGYKAKFEIILQVNVDKTDSSIWNFKLNDENADVNLSEITSDLTDTQLQILDLVRNLFSAISLLNIVDEGSTLSESMIRKYNDHAQDLKLLKTVIKNHSDRKKAHNLQLAYDKYVNNRHFVDVETKKAFPNKHLYRKSDFYEIVKKNLDASKEAVQIRKEIALDKFMPKQRSDENGVIPFQLNQIELDKIIENQGKYYPFLKEINPIKAHRMQAPYKLDELIRFRVPYYVGPMIEPTNSSYPQTRQNQSFAWMVRKAKGRITPWNFDEKVDRQKSANNFIKRLTTKDTYLFGEDVLPANSLLYQKYTVLDELNKISVNGKKLSVSVKQELYEDLFKKNNTVSAKQLKNWLIENQKLPYIKIKGLADQTKFNSSLSTYIKLKKSGLFVDKLDSNEFRDDFEKIIEWSTIFEDKQIYIQKLQTIDWLTAKQIQFLQNIRLQGWGRLSKKLLTAIVDSNGQNIIEQLWNSQQIFMSIVNKADIKGTITDANQDLMHSNSMEDILSEAYTSPANKKMIRQVVKVVHDIQKAASGQAPKQIAIEFARESRRNSKLSQTRGHKLQDIYQKISGDIVNKNLKDKLAEYIKNNQLSVWEKNSFQMNKNDQDFLF

SEQ ID NO: 489 - protein, 347 aa, Lactobacillus crispatus
MVNLKSLVLILKKENEILKKTKNFDFVAKLLGSKAPNEIRSQQGKVLFEKNKIRLQLNKAYNYKYMLVSRDTTTKNQEMFGMTIYPRAERDIAKSRKLIEKRKGFSTDIYGGYTGTAAAYMAIVRINKTKSSQYKVIAVPMTKRAILNKAEKEGNYEKILKQILSPSILYNDKGKRKAGVISFDIIKGKVPYNQVVQDGNKKFLLKSAIYLCNAKQLVLSEEAMRVITGHWLDSDKQDQELLDVYDEILEKIDRYLPLFDIRDFRNKLHKGREKFLKLNAEDKFKAIIQILKGLHDNSDTGELKDIGITVPFGQLQNNSGITLSSDTILVYQSPTGLFEKRVKISSL

SEQ ID NO: 490 - protein, 534 aa, Lactobacillus crispatus
RDAYTDKPINIDEVSQYYDIDHILPQSFIKDDSLNNRVLVAKPINNGKSDGVPLKLFGDNLATGLGITVKQMWNNWADKGLINKAKQNNLFLDPENINKHQASGFIRKQLVETSQIIKLATTILQAEYPKTKIIVVKASSNHYLRNEFDLYKSREVNDYHHAIDAYLTTICGNLLYQAYPKLRPFFVYGQFKKFSSDPKKENEILKKTKNFDFVAKLLGSKAPNEIRSQQGKVLFEKNKIRLQLNKAYNYKYMLVSRDTTTKNQEMFGMTIYPRAERDIAKSRKLIEKRKGFSTDIYGGYTGTAAAYMAIVRINKTKSSQYKVIAVPMTKRAILNKAEKEGNYEKILKQILSPSILYNDKGKRKAGVISFDIIKGKVPYNQVVQDGNKKFLLKSAIYLCNAKQLVLSEEAMRVITGHWLDSDKQDQELLDVYDEILEKIDRYLPLFDIRDFRNKLHKGREKFLKLNAEDKFKAIIQILKGLHDNSDTGELKDIGITVPFGQLQNNSGITLSSDTILVYQSPTGLFEKRVKISSL

SEQ ID NO: 491 - protein, 278 aa, Lactobacillus crispatus
SVNGKKLSVSVKQELYEDLFKKNNTVSAKQLKNWLIENQKLPYIKIKGLADQTKFNSSLSTYIKLKKSGLFVDKLDSNEFRDDFEKIIEWSTIFEDKQIYIQKLQTIDWLTAKQIQFLQNIRLQGWGRLSKKLLTAIVDSNGQNIIEQLWNSQQIFMSIVNKADIKGTITDANQDLMHSNSMEDILSEAYTSPANKKMIRQVVKVVHDIQKAASGQAPKQIAIEFARESRRNSKLSQTRGHKLQDIYQKISGDIVNKNLKDKLAEYIKNNQLNKDKYY

SEQ ID NO: 492 - protein, 277 aa, Lactobacillus crispatus
SVNGKKLSVSVKQELYEDLFKKNNTVSAKQLKNWLIENQKLPYIKIKGLADQTKFNSSLSTYIKLKKSGLFVDKLDSNEFRDDFEKIIEWSTIFEDKQIYIQKLQTIDWLTAKQIQFLQNIRLQGWGRLSKKLLTAIVDSNGQNIIEQLWNSQQIFMSIVNKADIKGTITDANQDLMHSNSMEDILSEAYTSPANKKMIRQVVKVVHDIQKAASGQAPKQIAIEFARESRRNSKLSQTRGHKLQDIYQKISGDIVNKNLKDKLAEYIKNNQLNKDKY

SEQ ID NO: 493 - protein, 1368 aa, Lactobacillus curvatus
MSRPYNIGLDIGTSSIGWSVVDDQSKLVSVRGKYGYGVRLYDEGQTAAERRSFRTTRRRLKRRKWRLGLLREIFEPYITPIDDTFFLRQKQSNLSPKDQRKLYTQTSLFNDRTDRAFYDDYPTIYHLRYRLMTEKRQFDIREIYLAMHHIVKYRGHFLNEAPVSSFKSSEINLVAHFDRLNTIFADLFSESGFQLETDKLAEVKALLLDNQQSASNRQRQALSLIYTPSTNKAVEKQNKAIATELLKAILGLKAKFNVLTGIEAEDVKAWTLTFNAENFDEEMVKLESSLDDNAHQIIESLQELYSGVLLAGIVPENQSLSQAMITKYDDHQKHLKMLKAVREALAPGDRQRLKQAYDQYVDGQENTKAYSKEDFYGDITKALKNNPDHPIVSEIKKLIELDQFMPKQRTKDNGAIPHQLHQQELDRIIENQQQYYPWLAELNPNSKRQTVAKYKLDELVAFRVPYYVGPLITAEQQRQSSDAKFAWLIRKAEGRITPWNFDDKVDRQASANEFIKRMTTTDTYLLAEDVLPKQSLIYQRFEVLNELNGLKIDDQPITTELKQAIFTDLFMQKISVTVKNIQDYLVSEKRYASRPAITGLSDENKFNSRLSTYHDLKMIVGDAVDDVDKQADLEKCIEWSTIFEDGKIYSAKLNEIDWLTDQQRVQLAAKRYRGWGRLSAKLLTQIVNANGQRIMDLLWDTTDNFMRIVHSEDFDKLITEANQMMLAENDVQDVINDLYTSPQNKKALRQILLVVNDIQKAMKGQAPERILIEFAREDEVNSRLSVQRKRQVEQVYQNISNELLNNTEIRNELKDLSNSALSNTRLFLYFMQGGRDMYTGDSLNIDRLSTYDIDHILPQSFIKDNSLDNRVLVSQKMNRSKADQVPTDFTSVELGQKMQIQWEQMLRAGLITKKKYDNLTLNPDHISKYAMKGFINRQLVETRQVIKLATNLLMEQYGEDNIELITVKSGLTHQMRTEFDFPKNRNLNNHHHAFDAYLTAFVGLYLLKRYPKLKPYFVYGEYQKASQQDKWRNFNFLNGLKKDELVDENTEAVIWDKESGLAYLNKIYQFKKILVTRGVHENSGALFNQTLYAAKDDKASGQGGKQLIPAKQDRSTALYGGYSGKTVAYMCIVRIKNKKGDLYKVCGVETSWLAQLKQLTDEDSQKAFLEQKISPQFTKVKKQKGNIIEAVEEFEVIAPHILINQRFFDNGQELTLGSATYKHNEQELILDKTAVKLLNGALPLTQSEELAEQVYDEILDQVMHYFPLYDTNQFRAKLSTGKAAFMKLPWKSQWDGNKMVQVGQQVILDRILIGLHANAAMSDLKVLKMTTPFGMIQQSTGITLSADTQIIYQSPTGLFERRVALRDL

SEQ ID NO: 494 - protein, 669 aa, Lactobacillus delbrueckii
MAKPKDYTIGLDIGTNSVGWVVTDDQNNILRIKGKKAIGARLFTEGKVAAERRSFRTTRRRLSRRRWRIKMLEELFDEEIAKVDPSFFARLHESWISPKDKRKRYSAIVFPSPEEDKKFHESYPTIYHLRDKLMKDDQKHDIREIYIAVHQMIKARGNFLHDESVETYRSGMSSLGGRSERNILSVQTLEELNDLFAENEGTEEVELNVASAEQINDILTGGHLNADSQKEISNLLLPSSFPSFDDKAKEKQVKKLINNVATNISKAWLGYKADFSTILNLAKVDKDQKKIFAFALQGGDEEDKVQELESLLEQSQTDIVDRLIEIRHAIVLSEIVPVGMTLSEAMIDKYDQHKEDLITLKAVIRNTKDKKKAAKLQAIYDLYVKKRHADLAKAMKLTGIKKRSELLDPEELKKGISSLLDDSPEAVEIKQRLEEKTFLPLQRSNNNGVIPNQLHQVELDEIIKKQSKYYPFLAEKNPDESEEAQKKAPTKLDALLTFRVPYYVGPMITKEEQEAQNGHSFAWMVRRDPQDHEAITPWNFEKKVDKMASATQFIKRMTTKDTYLLGEDVLPASSLKYQLFTVLNELNNLRVNGKKLTSDEKEQVIEGLFKKQKTVKADKFVKYWQAKHIGADIKVKGLSDPSKFNSTMSTYIDFKKIFGDQLNDVNRQR

SEQ ID NO: 495 - protein, 544 aa, Lactobacillus delbrueckii
MTGCADYDVDHIMPQSFVKDDSLDNRVLVARAVNNQKSDKVPALLFGNKVVADLGITVREMWDKWQKLGMISKRKLSNLLTDPDALTEYRAQGFIRRQLVETSQVIKLTATILQSEFPDSKIIEVPAKYNSIVRKQFDLYKSREVNDFHHAIDAYLSTIVGNYLYQVYPNLRRMFVYGEFKKFSSNAEESAHDVARRVKSMNFLDDLLRGTHGDNIYCRSTGEIVFNRNDIISKLKQAYSFKQMLVTQEVFTKKSALFDQTVYPSPERDSKKRSGLIPRKKGMDTEIYGGYSGNKDAYFVLAEAVKEKGHTLQIVGVPIRALNTLKNSANYSEKLLEIIKPQVMFNKDTGKPIKGIKDVKILMDKIPCRQPVLEGESYYMLASSKYRYSLKQISLSQMSMKYILDYIDDPNFNKHEMINIDQQDEKECLLSVYDEILEKMDKYLPLFDIRSFRKKLHDGRDAFIALPVASEEKKPGEVDVIRKILKGLHANADITNLAELGFGTAALGALVSTGGIKISDDAVFIYQSPTGLFERRVKVSDLLK

SEQ ID NO: 496 - protein, 1356 aa, Lactobacillus farciminis
MTKKEQPYNIGLDIGTSSVGWAVTNDNYDLLNIKKKNLWGVRLFEEAQTAKETRLNRSTRRRYRRRKNRINWLNEIFSEELAKTDPSFLIRLQNSWVSKKDPDRKRDKYNLFIDGPYTDKEYYREFPTIFHLRKELILNKDKADIRLIYLALHNILKYRGNFTYEHQKFNISNLNNNLSKELIELNQQLIKYDISFPDDCDWNHISDILIGRGNATQKSSNILKDFTLDKETKKLLKEVINLILGNVAHLNTIFKTSLTKDEEKLNFSGKDIESKLDDLDSILDDDQFTVLDAANRIYSTITLNEILNGESYFSMAKVNQYENHAIDLCKLRDMWHTTKNEEAVEQSRQAYDDYINKPKYGTKELYTSLKKFLKVALPTNLAKEAEEKISKGTYLVKPRNSENGVVPYQLNKIEMEKIIDNQSQYYPFLKENKEKLLSILSFRIPYYVGPLQSAEKNPFAWMERKSNGHARPWNFDEIVDREKSSNKFIRRMTVTDSYLVGEPVLPKNSLIYQRYEVLNELNNIRITENLKTNPIGSRLTVETKQRIYNELFKKYKKVTVKKLTKWLIAQGYYKNPILIGLSQKDEFNSTLTTYLDMKKIFGSSFMEDNKNYDQIEELIEWLTIFEDKQILNEKLHSSKYSYTPDQIKKISNMRYKGWGRLSKKILMDITTETNTPQLLQLSNYSILDLMWATNNNFISIMSNDKYDFKNYIENHNLNKNEDQNISDLVNDIHVSPALKRGITQSIKIVQEIVKFMGHAPKHIFIEVTRETKKSEITTSREKRIKRLQSKLLNKANDFKPQLREYLVPNKKIQEELKKHKNDLSSERIMLYFLQNGKSLYSEESLNINKLSDYQVDHILPRTYIPDDSLENKALVLAKENQRKADDLLLNSNVIDRNLERWTYMLNNNMIGLKKFKNLTRRVITDKDKLGFIHRQLVQTSQMVKGVANILDNMYKNQGTTCIQARANLSTAFRKALSGQDDTYHFKHPELVKNRNVNDFHHAQDAYLASFLGTYRLRRFPTNEMLLMNGEYNKFYGQVKELYSKKKKLPDSRKNGFIISPLVNGTTQYDRNTGEIIWNVGFRDKILKIFNYHQCNVTRKTEIKTGQFYDQTIYSPKNPKYKKLIAQKKDMDPNIYGGFSGDNKSSITIVKIDNNKIKPVAIPIRLINDLKDKKTLQNWLEENVKHKKSIQIIKNNVPIGQIIYSKKVGLLSLNSDREVANRQQLILPPEHSALLRLLQIPDEDLDQILAFYDKNILVEILQELITKMKKFYPFYKGEREFLIANIENFNQATTSEKVNSLEELITLLHANSTSAHLIFNNIEKKAFGRKTHGLTLNNTDFIYQSVTGLYETRIHIE

SEQ ID NO: 497 - protein, 1313 aa, Lactobacillus fermentum
MHYLDEIFAPHLQEVDENFLRRLKQSNIHPEDPAKNQAFIGKLLFPDLLKKNERGYPTLIKMRDELPVEQRAHYPVTNIYKLREAMINEDRQFDLREVYLAVHHIMKYRGHFLNNASVDKFKVGRIDFYKSFNVLNEAYEELQNGEGSFTIEPSKVEKIGQLLLDTKMRKLNRQKAVAKLLEVKVADKEETKRNKQIATAMSKLVLGYKADFATVAMANGNEWKIDLSSETSEDEIEKFREELSDAQNDILTEITSLFSQIMLNEIVPNGMSISESMMDRYWTHERQLAEVKEYLATQPASARKEFDQVYNKYIGQAPKERGFDLEKGLKKILSKKENWKEIDELLKAGDFLPKQRTSANGVIPHQMHQQELDRIIEKQAKYYPWLATENPATGERDRHQAKYELDQLVSFRIPYYVGPLVTPEVQKATSGAKFAWAKRKEDGEITPWNLWDKIDRAESAEAFIKRMTVKDTYLLNEDVLPANSLLYQKYNVLNELNNVRVNGRRLSVGIKQDIYTELFKKKKTVKVSDVASLVMAKTRGVNKPSVEGLSDPKKFNSNLATYLDLKSIVGDKVDDNRYQTDLENIIEWRSVFEDGEIFADKLTEVEWLTDQQRSALVKKRYKGWGRLSKKLLTGIVDENGQRIIDLMWNTDQNFMQIVNQPVFKEQIDQLNQKAITNDGMTLREWVESVLDGAYTSPQNKKAIWQVVRVVEDIVKAVGNAPKSISIEFARNEGNKGEITRSRRTQLQKLFEDQAHELVKDTSLTEELEKAPDLSDRYYLYFTQGGKDMYTGDPINFDEISTKYDIDHILPQSFVKDDSLDNRVLVSRAENNKKSDRVPAKLYAAKMKPYWNQLLKQGLITQRKFENLTMDVDQNIKYRSLGFVKRQLVETRQVIKLTANILGSMYQEAGTDIIETRAGLTKQLREEFDLPKVREVNDYHHAVDAYLTTFAGQYLNRRYPKLRSFFVYGEYMKFKHGSDLKLRNFNFFHELMEGDKSQGKVVDQQTGELITTRDEVAKSFDRLLNMKYMLVSKEVHDRSDQLYGATIVTAKESGKLTSPIEIKKKRPVDLYGAYTNGTSAFMTIIKFTGNKPKYKVIGVPTTSAVGLKRVGKPGSESYNQELHRIIKSNPKVKKDFEIVVPHVSYSQLIVDDDCKFTLASDTYQHPATQLVLSKESMEIIADDFKFVKENTATADEQLVRVFDEIVNQMNHYFTIFDQRSNRQKVTKARDKFVSLPTESEYEGAKKTQVGKTEVITNLLMGLHANSAQGDLKVLGLSTFGFFQSSGGLNLSEDAMIVYQSPTGLFERRICLKDI

SEQ ID NO: 498 - protein, 1327 aa, Lactobacillus florum
MTEQQQPYNIGLDIGTSSIGWAVTDQNDKLLHIRGHNGIGVRLFKEGESAAERRGFRTTRRRLSRRRWRLRFLDRIFDAELAKVDPNFLARLKQSNISPLDPNKQMFGNILFDDPQFDDQKFHQQYPTIYHLRSALAQPDAPQADVRLIYLALHHMIKFRGHFLNGAAVEKFHGGQLHLESEFQELNQIFSNQQRDHVQLQTSSLDEVATILKDNQRTPSDRQRELSARLFVPVDKTIDKENKKLATELLKAVLGLKAKFDVILGVEATDPQAFKLQFSSDDFDDKIAELASELTDEANEILTVLQRLYFSLNLADILTNRQTKQVADSISTAMINRYDDHKHHLKMLKELEAQVTQEQRDGLKKAYDEYIDGDKPTIDTFYTNIKKNLDDSELANQIKSLIDLQAFMPKQRSKENGSIPHQLHQRELDQLIEVQGKYYPWLLAAKDKLDALIAFRVPYYVGPMIDPNQSDDPQNTKFAWMVRKEAGEITPWNFEEKVDKTSSATNFIKRMTTTDTYLLGEPVLPKNSLLYQQFTVLNELNKLKVNGKALTVDQKKYLYEHVCKKQRRVTLKKLSDCLMARGDFPMGAIFTGTTDQKNMNNTLKTYQDFQEIFGDEIDNPDRQVDFEKMIEWSAIFEDREIFKLKLAELNWLTSEQLERVSKKRYQGWGRLSQKLLTHIVNENGERIIDQLWNTNQNFMEIMGQDSVKQAIQEHNGANVAQTGINETIDELYTSPQNKKAIRQILLVVDDIKKAVGYAPANIMMEFAREDRDDHRLIASRARQLEKTYQEISKNWFDNESVTQELKDQIKNKTKFTDRLYLYFIQGGIDLYTGHPLNIDQLSSYDIDHILPQSFLLDNSLNNRVLTSQAENRVHKEDRLPGETVANKMRPTWKMMREQGLMTQRKYNNLTLKPDQISKFNNRGQFINRQLVETRQVIKLAADIMSQKYQADQTKVVTVKANLTHHMREKFNFYKSRNVNDYHHAFDAYLTLFVGNWLLKEYPKLQPYFVYGDFAKTGTNNLKSFNFLYRFERDHKLNDKGAIDTDKDQQLGYMKRIYRFKKMLVTKQLETNEGALYGQTLYPAPKNDKKTRNLINSKKNRPSDIYGGYSNENGSFLTLVKLKKGSKYDYRLVAVPVSKISEIKESELATIEKAIAPQFLKSSGKYRDFQVVLSKILINQKVIDDGMIFTIGSKSYKHNAKQVVLSDNSIQIVSTLSRISDKEKLITVFDEIVDITSKYLPWYKVNDVEKTKMLFRQMQDIDEMKKIIDNSLIGLHCNASITDLGKVGLSKYWGRFVLTAGISLTVDAQLIYQSPTGLFEHRVKVSDL

SEQ ID NO: 499 - protein, 1386 aa, Lactobacillus hominis
MTKITEDYIVGLDIGTNSCGWVAMDSKNTILRMHGKTAIGSHLFDAGNSAADRRAFRTTRRRIKRRKWRLKLLEEIFDSHLAKVDPYFFARLKESGLSPLDTRKNVSSIIYPTSLEDKKFYVDNPTIYHLRYKLMTEDRKFDLREVYLAIHHIVKYRGNFLYNTPVKAFEASKIDVKGSLKKLNELYEGLDSEFNVELDSNNALEIENIIRDKKIFKINKVKEINQLLSLKTEDKERTKLMKDVSKQIVNAILGYKTKFETILLKDVSKDEADDWEFKLTDVDADNKFENLIGDLNENEQEILLVIRKLANAITLSNIVEEGKTLSESMKDKYKKHSDDLKLLKQVISDHPDRDKAKKLALAYDLYVNNRHGKILQAKDILEKKKTLSKEDFYKEIKKNLDDSKESQEILDAISLDSFMPKQRTNENGVIPYQLHQLELDKIIENQGKYYPFLKEVNPVSSHLKQAPYKLDELIRFRVPYYVGPLISPNESTKNKQTKKNQNFAWMIRKEQGQITPWNFDQKVDRMASANKFIKRMTTIDTYLLGEDVLPANSLLYQKFTVLNELNNVKINGKRISVPLKQELYNNLFKKNSTVTTNKLKSYLKENYKLIKVEIKGLSDEKKFNSGLTTYNKLKNLKIFDQQIDDPNYNKDFERIIEWSTIFEDKAIYKEKLKTIDWLSDRQIDKLSKIRMQGWGQLSKKLLSQLTDNNGQTIIEQLWDSQNNFMQIVNQADFKDAIAVANQNLLVDTSVEDILNEAYTSPANKKAIRQVVKVVDDIVKATSGKVPKQIAIEFTRDADDNAKISQSRANKLRKVYKEMSNELASETIRNELERVAKDQKLLKDKHYLYFMQLGRDAYTGELIDIDNLEQYDIDHVLPQSFIKDDSLENRVLVKKAVNNGKSDNVPVKLYGNRMATDLGMTIRHMWEKWKEQGLITKTKYNNLIIDPDKINKYESSGFIHRQLVETSQIIKLVSTILQSKYPDTEIIVVKARYNHYLRKRLNLYKSREVNDYHHAIDAYLSAICGNLLYQVYPYLRPFFVYGQYKKFSSEPEKEKIIYDKTRRYNFISQIFENKDNDIISRETKKKVFDKKDIIEKLKRAYNYKYMLVSRETETHDQEMFKMTVYPRLSRDTKKSRNLIPKKKDMPTEIYGGYTNNSDAYMIIARINKKKGPEYRVFGVPMRELVNLRKAEKNGHYKAYLKQVLEPEIMYSKNGKKNKTISSFEIVKAKVPYKQVILDGDKKFMLASSTYVQNAKQLTLSQYSMQAITDNCENDTEEEKALVEAYDEILTNIDKYLPLFDINKFREKLHAGREKFVDLPLAEKKETILQVLNGLHDNAVMPKIKSLGLSTPLGFMQFHTGVSLSENAKLIYQSPTGLFEKRLKISDL

SEQ ID NO: 500 - protein, 270 aa, Lactobacillus iners
MITYLKDNDDITLSFPKDQLINIFKNSNLNSTEKSDQLKPFFGRTNLEKGIIKLLSGGKQDLSNMFRDETLKNSNYKNLKFSDNRFDDERDGYAADLGDRIDLLILLKQIYDASILESMMSQARVSIDGHKYISSAKVCAYEKHKSDLKRLKSLIKKYLPSEYNNIFRKITEKDNYVAYSKSNITNNKREKALKYVKYVDFTKYLTKKLKTIKTQDAEDDQEIFEIKGELEKQSFLPKQRTLDNSIIPYQLHLMELKKYLIINLNIMTFC

SEQ ID NO: 501 - protein, 255 aa, Lactobacillus iners
MITYLKDNDDITLSFPKDQLINIFKNSNLNSTEKSDQLKPFFGRTNLEKGIIKLLSGGKQDLSNMFRDETLKNSNYKNLKFSDNTFDDERDGYAADLGDRINLLILLKQIYDASILESMMSQARVSIDGHKYISSAKVCAYEKHKSDLKRLKSLIKKYLPSEYNNIFRKITEKDNYVAYSKSNITNNKREKALKYVEYVDFTKYLTKKLKTIKTQDAEDDKEIFEIKGELEKQSFLPKQRTLDNSIIPYQLHLME

SEQ ID NO: 502 - protein, 343 aa, Lactobacillus iners
MLAKDDQEGITVKDKIISLLTFRLPYYIGPVNPAVHGKFAWVKRLANGKVTPWNYKEKIDIDASHEEFIKTKLSKCSFLIGCDVLPKNSLLYQKYMVLSELNTIKFNGVNISEKLKDDIYQNLFKNIQKVTKKRLQNYIKEHENIIGDVIVTGIDNAFKQGLVSYLKFKKIIGDKIDDDRYQKVLEKIIRDITLYDECAGKKIKKEYKDSDLFTEDELNKIVKLTFNDWGRLSAELLDQLEGEDTVSGETGKIIEFMQKHNYNLMQLMSKKFTFKYKIDEINKSYYQHDKFNYKSMIDSLYVSPATKRILWQSLKVVHEISKIMKHDPEKIFYRNGTFQRRSS

SEQ ID NO: 503 - protein, 447 aa, Lactobacillus iners
MLYDHKLIGDKKYARLIRSKAFTDDELAGFIARQLVETRQATKETADLLKRLCPKSRIVYAKAQNASIFRQKFDIPKSRTINDLHHAQDAYLNIVVGNIFDTKFTQDPRNFIKNTKDSRNYNLEKIYDYNVERNNYVAWIAPDSKTNGTIANVKCNLSTKDFRVTRPSFYKKGALFNQNLSRKGSNLAPIKEHSPKSNPLKYGGYSGKNNSFFVVVAGKDNKGKDIVKLIPVNTLIYNKMLHCDYKAKQELLTSYVANNFAINNFRIVKDDIKMYSLVKIDGAYYYLVGGTDERIEVKNAMQLLLSKDSIKAVKILEKESKDQFANIKNYKDIDIKLGRTFNEVISKYTNSVFGKSMLISDKYRKDIFKSVDKSILEFNSLNTIAKADNLLKFVTSMRPAGSVDALKMVGLIERIRKSNVISNFNEFKLINQSVTGLFENEEDLLKL

SEQ ID NO: 504 - protein, 667 aa, Lactobacillus iners
MQKHNYNLMQLMSKKFTFKSKIDEINKSYYQHDKFNYKSMIDSLYVSPATKRILWQSLKVVHEISKIMKHDPEKIFIEMARSKEDHPKRKLSRKADLKQVYKDSKKQIISIIGKDKYQDLSNELDNKDDRDLRWDNLYLYYTQLGRSMYSLKPIDISELMNKNLYDQDHIFPKSKKYDDSIENRVLVEKELNVKKSDIYPISDANIIPQKIKGQVESFWKMLYDHKLIGDKKYARLIRSKAFTDDELAGFIARQLVETRQATKETADLLKRLCPKSRIVYAKAQNASIFRQKFDIPKSRTINDLHHAQDAYLNIVVGNIFDTKFTQDPRNFIKNTKDSRNYNLEKIYDYNVERNNYVAWIAPDGETNGTIANVKCNLSTKDFRVTRPSFYKKGALFNQNLSRKGSNLAPIKEHSPKSNPLKYGGYSGKNNSFFVVVAGKDNKGKDIVKLIPVNTLIYNKMLHCDYKAKQELLTSYVANNFAINNFRIVKDDIKMYSLVKIDGAYYYLVGGTDERIEVKNAMQLLLSKDSIKAVKILEKESKDQFANIKNYKDIDIKLGRTFNEVVSKYTNSVFGKSMLISDKYRKDIFKSVEKSILEFNHLDTIGKADNLLKFVTLMRPSGSAHSLKMVGLIERIRKSNVISNFNEFKLINQSVTGLFENEEDLLKL

SEQ ID NO: 505 - protein, 1395 aa, Lactobacillus jensenii; identical to SEQ ID NO: 118

SEQ ID NO: 506 - protein, 1382 aa, Lactobacillus mucosae
MDIGTNSIGWTAIDDHFSLLRVKGKNAIGVRTFKEGETAADRRGFRTARRRLSRRRWRLQFLDEFFAPYLAEVDPNFLARLKQSDISAKDPAKNQEYMGKLLFPDQEAASDGNGYPTLIQMRKAMPAEKAADFPVFNIYQLRYALMNEKRKFDLREIYLAVHHIVKYRGNFLNNTSVDKFKADQIDFNKSFETLNDLFRQVQPIAPFQIDLTKVDELGKLLLDTKQKKLDRQKAVAKLLPLIEDGTDKEIVKAHQQTAREISKLILGYKAKVGLILQNNLDQTLDMSTENSDDQLMQIAEELDDYQMELINQLSLLYSQIMLNEIVPNGETVSASMLNRYYKHRCQLKELKDYGAAQDKKTREQLDHLYAEYIGQIPKDSKFDFTKDLKKLMDKSDLGQKIKDEIEAGDYLPKQRTSANGVIPHQMHQQELDQIIENQKEYYPWLAEPNPVEKNIKNAKYKLDQLVSFRVPYYVGPMITLADQQKTSKASFAWAVRKKAGKITPWNFYDMIDREKSANNFIKRMTNKDTYLLSEDVLPASSLLYQKFTVLNELNNIRVNGRKLQPALKQAIYTDLFQKRKTVNLKTLTNFLAIHEPTLTKPKIEGLSNGRSFNSSLGTYIDMSKILGDSLDDLNYRDDIEKIIEWSTVFEDSEIYGVKLQEIQWLTNEQREKLVRKRYQGWGRLSKKLLTGITDENGQRIIDLMWDTSKNFMQIVHQPVFEEQIAELNQQLLQDADKAPLEVVDDILADAYTSPQNKKAIRQVVKVVADVVKAVGNAPASISIEFARNEDRNKELKNSRRHSIEKLYHETAEKLVKQTNLLEELGNVKDLNDRYYLYFTQAGRDMYDGTPINIDEISTHYEIDHILPQSFLKDNSLDNRVLVKKSENAAKSDRVPAKLYGAKMRAFWKQLKESQLISNRKYLNLTTDPEQVDKYQMQGFVHRQLVETRQIIKLAANIFGSLYPDSAVIETRAELTKQLREKFSLYKVRDVNDYHHAVDAYLTAFAGHYLYQRYPKLRPMFVYGDYAKIYADDLKRLRSVNLFHDLEKDQYNSGTAVNPETKEKIVDVDWLSDYVSKIQHFKYMLISKAVYTQHGQLYGATILPVAQVDKISAPIGIKDDKPVDIYGAYTNEVAAYMAIVRVNGKKPKYKVVSVPVRMLQRLKMAEQKGHDQYMQTLHDVLLRNFTSLKKNRKTGLKEAVVKDFDVLVPCVRYNQLVIDGDTKFTLGSATYQHNAKQLVLCNHSLETLANNFEYVRKHPDEADERMIMLYDDILDQVNHYFTLYDKNKFREKLNAGRDKYLKLPTFSQFENNKKTAIGKSEAIINILRGLHANAAITNLKCLGVSTPFGQLQSPSGIELSENAKLVYQSPTGLFSREVLLKDL

SEQ ID NO: 507 - protein, 1382 aa, Lactobacillus pentosus
MKKIVNYNLGLDIGTSSIGYAAIDDQGRPVRHQNKTVMGVRLFKEGKTAESTRIFRGTRRRLSHRHWRLGYLDRIFDNEIAKVDENFLPRLKASKRARSDEKRSFRGSLLFPETGDDAYYQKYPTIYHLRYALITQKKQFDIRLIYLALHHMIKYRGNFLDTTPVSAFNIHDIDLTDQFASLNDCYQLLDMDFEFQFDLNNIEQVQKLLLDETLSKTKRQAAVSKVLVMSTGNKAFDDQQNGIASEFIKALLGGPFDLSKILNLSVADVKSWKLHMTDKDVDDTLNSLVEELDENHKQIVNLLQMIYSQVMMLGLLNGQQSISASMIERYDDHAKHWAALKKLLPALGEQEQSTIIHAYTAYTGHSRTKQLSRAEFYTKVNSILKKHENIAEATGLIELIDRNEFMPKQRDAVNGVIPHQLHQRELQLIIQNQQKYYPFLAAKAYPDADETMIEQLLSFRVPYYAGPLVDRDFINESSDQEQAMQNTKFSWLKRREAGEITPWNFEQKVDVQETANRFIKRLTTKDTYLMTEDVLPKESLIYQRFEVLNELNAIRINDRRLTAENKQLAFQQLFMAGNTKNVSIKKFRNFVFDSLKFPEKVKITGFAGQHNFLAKLSTYHDFKKIFGERVDHTDLQPDFERIVEWCTIFEDRHIYREKLKEIQWLSQSEIDQLVLIRNHGWGRLSKRLLTGIRDSDGRTVMDQLWFGTDNFMRIISQSDFAAAIANENRTQLNQHGLEDVLDSAFMSPQNKKAIRQVLKVVDDIEQTLGCPPKKVMIEFTRSPDKKKQRTVTRLEKVQQAYKAVADQLAGQSIVSELDQYANTHSKLSDTYYLYFMQLGRDLYSGKPIDIDSPMLDDDHILPRAFMKDNSLDNRALTEKPINNTKAAKFPSKVFGQQKEVTDFWKLLRRCGLMSNIKEKHLYLDPDNVDKWTRRGFIHRQLVETSQVIKIVANILNDRYQQSQTEVLEVPARLGTELRECFGWYKVREVNDYHHVFDAYLAAFIGNYLYRRYPKLQPYFVYGNFAELNKAQLKNIKSFNFLYNITDNKRVVKDIETGQTLWDDQIRQQIQHIYEYKYMLTSHEAFTQHKELYGQTIYPRREFKPGTLKAIKQDQPQELYGGYKNLTAAYMCIVKIQARKRRAAEYRVVRVATESLSALQQAKRLGVQAYERCLRQELVRNNEILRTNADPNSAPREFEVLLDRVLCHQMIISDGQKYLLGSHAYKINCMQLVLSNNSMKILSTSIVKLKQMTNEPLVQVYREILDVVNKYFTLYDVNSFRENLNQFFDKFRTLPITNEYESSKSGKKLIHRGQLETLTLILRGLHANSDKVQYGDQSTLLGGFQTKDGIKLSKDSVIQYTSPAGLNVRTVKLRDLEQKEAQK

SEQ ID NO: 508 - protein, 1361 aa, Lactobacillus pentosus
MNEPYGVGLDIGTNSVGWTVVDMNGRVRKVKGKTALGARLFKEGATAEDRRGFRTTRRRLKRVKWRLRLLREFFDQPISKIDPNFFARRKYSDISPRDPNYNGLAKTLFNDRTDKEFYDDYATIYHLRDKLMTSNRKFDIREIYLAIHHIVKYRGNFLRTGPASQYGSASLHLATSFQKLNDLFAQSEETLNLKLVTDEALLQQIQQILVRTDLSRSEQQRQIWPLMAVLTGASAAEKKRQKNVVVELSKALVGLKAKMNVVTLTEVDAAVVKDWTFTMEESQDKLPEIEEQLSEVGQQIMDEVIQLYASVNLAQLIPAGKRFSQHMVEKYKHHEKNLELLKAYIHSQSDSKRGREIRATYDRYIDGVDSKPVTQEMFYKDLMKYVEADATSNHLAAEIKDEIDSEQFMPKLRTKQNGSIPYQVQQYELDQIISHQKKYYPWLGEENPVAERRGKFPYKLDELVGFRVPYYVGPLITKEDQQATSGAGFAWMVRKADGPITPWNFDQKVDRIASATAFIQRMQTTDTYLIGEDVLPARSLIYQRFMVLNELNNMRVEDRKLAPQQKQRLYNQVFKQHQHVSVKNIQQNLMDAGEYRKTPQITGLADPKGFNSSLSTYHDFKKILLEAIADEHKRADIEKIILWSTTFEDSAIFKQKLEEVAWLTDAQRKQLSGLRYRGWGQLSHKLLTAFKDDKGRSIMDGLWETSDNFMQLRKQPAIETQIKEANQANLTDADIQDTINELYTSPQNKKAIREVMLVLDDIKNAMHGQTPSWIFVEAARGGGVAGRRTQSRSSQIVEAYKGTAKEIVSEKVQHELNEKIKAKADFNTRLVLYFLQNGRDLYTNEAINIDRLSEYDIDHILPQSLVKDDSLDNRVLTSARINREKNDTFASEKFGRKMGAQWRELHRNGLMTQRKLKHLLMRPDEISKHATDFINRQLVETRQVIKLVEELISSEYPAASIVAVKANLTHQFRQTFNFPKLREVNDYHHAFDASLTAFIGMYLLKQYPKLERFFVYGKFAKQPINLTRFNIIRKLAVAEKPIANIETGEILWDKTADIKYFEKLYNYKRLLVTHEVRENYGAMFKQTLFKASYNKSKTLVPKKNHMETSVYGGYSNQETAYLAIVRIPFKSGFKFIVVGIPTRMVAKIKHYQSLGATLNQATHKVIEPKFTKISRKTKQTVISDYEVVLPKVYLDQVVRDQVKGQMYRFSLGSDKEYHNVQELYLPLSIQQAFVGHYDESDDQRSNDLVKVYDAALKQLQRYFPLHLSRNFDQVASQAHQSFEGLKNNVQTSDKQLGKKEVLNSLFVGLHANATRSNLSVLGMSKDFGRIKSNGITLTDQAEIIYQSPTGLFERKVALKDL

SEQ ID NO: 509 - protein, 1358 aa, Lactobacillus pentosus
MNEPYGVGLDIGTNSVGWTVVDMNGRVRKVKGKTALGARLFKEGATAEDRRGFRTTRRRLKRVKWRLRLLREFFDQPISKIDPNFFARRKYSDISPRDPNYNGLAKTLFNDRTDQEFYHDYPTIYHLRDKLMTSDRKFDIREIYLAIHHIVKYRGNFLRTGPASQYGSASLHLATSFQKLNDLFAQSEESLNFKLVTDEAQLQQIQQILVRTDLSRSEQQRQIWPLMVVLMGATAAEKKRQKDFAKELANALVGLKAKLNVVTLTNVDTTVVKDWTFTLEESQDKLPEIEEQLSEVGQQIMDEVIQLYASVNLAQLIPAGKRFSQHMVEKYNHHEKNLELLKAYIHSQSDSKRGREIRATYDRYIDGVKSKPVTQEMFYKDLMKYVEADATSNHLAAEIKDEIDSEQFMPKLRTKQNGSIPYQVQQYELDQIISHQKKYYPWLGEENPVAERRGKFPYKLDELVGFRVPYYVGPLITKEDQQATSGAGFAWMVRKADGPITPWNFDQKVDRIASATAFIQRMQTTDTYLIGEDVLPARSLIYQRFMVLNELNNMRVEDQKLAPRQKQRLYNQVFKQHQHVSVKNIQQNLMDAGEYRETPKITGLADPKGFNSSLSTYHDFKKILPEAIADEHKRADIEKIILWSTTFEDSAIFKQKLEEVAWLTDAQRKQLSGLRYRGWGQLSHKLLTAFKDDNGRSVMDGLWETSDNFMQLRKQPAIETQIKEANQANLTDADIQDTINELYTSPQNKKAIREVMLVLDDIKNAMHGQTPSWIFIEAARGGGVAGRRTQSRSKQIVEAYKSTAKEIVSEKVQHELNEKIKAKADFNTRLVLYFLQNGRDLYTNEAINIDRLSEYDIDHILPQSLVKDDSLDNRVLTSARINREKNDTFASEKFGRKMGAQWRELHRNGLMTQRKLKHLLMRPDEISKHATDFINRQLVETRQVIKLVEELISSEYPSASIVAVKANLTHQFRQTFNFPKLREVNDYHHAFDASLTAFIGMYLLKQYPKLERFFVYGKFAKQPINLTRFNVIRKLAVAEEPIANIETGEILWDKTADIKCFEKLYNYKRLLVTHEVRENYGAMFDQTIFKATDSRKRLIQKKKGFATETYGGYTGRTLAYLAIVKVVTNKDTQYQVVGIPTTMVTQIQQLEASGLTSKQAVTKAIGAMINENNKKLQSYEVLLPKVRFEQVVRDEVKGHIHRFALGTDTYYHNIQELYLPLTIQRAFLGKRNDTDAQTEQNLLTVFETTLAQVNRYFPLYEMNKFKQILNSAQEKFAALPTKNKTVKNKLVTGKDGVLNNLFIGLHANASLGDLKILGMKIGFGKLQVPGGLKLTDQAEIIYQSPTGLFERKVALKDL

SEQ ID NO: 510 - protein, 1358 aa, Lactobacillus plantarum
MKEPYGVGLDIGTNSVGWTVVDASGHVRKIKGQTGIGVRLFKEGAAAADRRGFRTTRRRLKRVKWRLRLLREFFDQPISKVDINFFARRKYSDVSPRDPNYNGLEKTLFNDRSDQDFYHDYPTIYHLREALMTQHRKFDVREIYLAIHHIVKYRGNFLRNDAATAYRSGTLDLQQHFETLNHLFSQADLELNLNLTTDVALLDSIKQTLVRTDISRSDRQKLIMPLLAVLTGATTAEKKRQKAVVTEFAKALVGNKTKIDVLTLTDIDATEAKDWAFSLEENQDKLPGIEDRFSEVGQQIIDEVIRLYASVNLAQLIPEGKRFSQSMVEKYKRHGEDLKLLKAYIRSQSDAKRGRAIRATYDQYIDGVKSKQVTQEAFQKALGKFVDADVDLNSWAAQIKQAIDSEQFMPKLRTKQNGAIPYQVQQNELDQIISNQKEYYPWLGEENPVIKRRGKFPYKLDELFGFRVPYYVGPLITKEMQAATANAGFAWMVRKADGPITPWNFDDKVDRVASATAFIQRMQTTDTYLIGEEVLPARSLIYQRFMVLNELNNIRVDDGQLTPRQKQRLYNQVFKKHKRVTAKNIQDNLVAAREFPTAPRITGLADPKVFNSSLSTYHDLKQVLPEAMSDVRKQADIEKIILWSTIFEDSTIFKQKLTEISWLTAAQLKQLGQLRYRGWGQLLRKLLTGLKDDNNRSIMDGLWETNANFMQLRSQPAIENQIKSANQANLTTADLQDTINELYTSPQNKKAIREVMVVLADIKDAMHGQTPNWIFVEAARGGGVAGRRTQSRSKQIVAAYQGTAQAIVRDQVQRELKEKIKNKANFNTRLVLYFLQNGRDLYTGDAINIDRLSEYDIDHILPQSLVKDDSLDNRVLTNARINREKNDTFASEKFGKKMGAKWKEMHRMGLMTKRKLDHLLMRPDEISKYATGFINRQLVETRQVIKLVEELINAEYPSTAIVSVKANLTHQFRQTFDFPKIREVNDYHHAFDAALTAFIGTYLLKRYPKLERFFVYGKFAKQPVNLTRFNVIRKLAKTDTPITDIDTGEVLWDKLTDIKYFETLYDYKRLLVTREVSENYGAMFDQTLLKASDNGKRLIRKKQSFDTAIYGGYTGKTLAYMAIVKVSTKKDVQYQVVGVPTTMVTQIEQLEQQGMTNKQAVTKVIEPLIAANNKKMLTYEVLLPKVRFEQVVRDRIKGQTHRFALGTDTYYHNIQELYLPLTLQRAFLGKQNESEVQLNQNLLTVFDATLAQVNRYFPLYEMNKFKKILNSARDQIELLEAKNQFVKNKLVLGKQGILTNMFIGLHANASYGDLKVLGVKIDFGKLQVPGGIKLTGDAEIIYQSPTGLFERKIALKDL

SEQ ID NO: 511 - protein, 1361 aa, Lactobacillus rhamnosus
MTKLNQPYGIGLDIGSNSIGFAVVDANSHLLRLKGETAIGARLFREGQSAAERRESRTTRRRLSRTRWRLSFLRDFFAPHITKIDPDFFLRQKYSEISPKDKDRFKYEKRLFNDRTDAEFYEDYPSMYHLRLHLMTHTHKADPREIFLAIHHILKSRGHFLTPGAAKDFNTDKVDLEDIFPALTEAYAQVYPDLELTFDLAKADDFKAKLLDEQATPSDTQKALVNLLLSSDGEKEIVKKRKQVLTEFAKAITGLKTKFNLALGTEVDEADASNWQFSMGQLDDKWSNIETSMTDQGTEIFEQIQEHYRARLLNGIVPAGMSLSQAKVADYGQHKEDLELFKTYLKKLNDHELAKTIRGLYDRYINGDDAKPFLREDFVKALTKEVTAHPNEVSEQLLNRMGQANFMLKQRTKANGAIPVQLQQRELDQIIANQSKYYDWLAKPNPVEKHRASKPYQLDELLTFRIPYYVGPLITPKEQAESRENVFAWMIRKDPSGNITPYNFDEKVDCPASANMFIQRMKNTDTYLIGEDVLPKRSLLYQKYEVLNELNNVSIDGRRLGADQKQRLIREVFERHSSVTIKQVAENLVAHGDFAKRPEIRGLADEKRFLSSLSTYHQLKKILHEAIDDPTKEHDIENIITWSTVFEDAAIFKTELAKISWLDSDTIKALSNIRYRGWGQFSRKLLDGLKLGNGHTVIQELMLSNHNLMQILTDETLKTTMAELNQDKLKADDIEDVINDAYTSPSNKKALRQVLRVVEDIKHAANGQDPSWLYIETADGPGTAGKRTQSRQKQIQTVYANAAQELIDSAVRGELEDKIADKASFTDRLVLYFMQGGRDIYTGAPLNIDQLSHYDIDHILPQSLIKDDSLDNRVLVNATINREKNNVFASTLFASKMAATWRKWHEAGLISGRKLRNLMLRPDEIDKFAHGFVARQLVETRQIIKLTEQIAAAQYPNTKIIAVKAGLSHQLREELDFPKNRDVNHYHHAFDAFLAARIGTYLLKRYPKLAPFFTYGEFAKVDVKKFREFNFIGALTHAKKNIVAKDTGEIVWDKERDIQELDRIYNFKRMLITHEVYFETADLFKQTIYAAKDSKERGGSKQLIPKKQGYPTQVYGGYTRENTAYLAVVKTVEKKADVYRVVRIATSQVAALKEARAQSTVKERELLKKFLTTKFTKIGKNGKKAITPFDIVIPRVPREQLFHNKRYGFFMVNSDTLMHNYQELWMSRSDQQILSKLVKSAKTVENGQVGRLFENIVEQINKYFPLYDINQFRKKLDQSKDIFSKLPLEGNGTTSGKRETIQNILTGAGTGAKNGDLKNLGIKTPFGFLQVPSGIVLDDDTTLIYQSPTGMLNRIVRLSEL

SEQ ID NO: 512 - protein, 1361 aa, Lactobacillus rhamnosus
MTKLNQPYGIGLDIGSNSIGFAVVDANSHLLRLKGETAIGARLFREGQSAAERRESRTTRRRLSRTRWRLSFLRDFFAPHITKIDPDFFLRQKYSEISPKDKDRFKYEKRLFNDRTDAEFYEDYPSMYHLRLHLMTHTHKADPREIFLAIHHILKSRGHFLTPGAAKDFNTDKVDLEDIFPALTEAYAQVYPDLELTFDLAKADDFKAKLLDEQATPSDTQKALVNLLLSSDGEKEIVKKRKQVLTEFAKAITGLKTKFNLALGTEVDEADASNWQFSMGQLDDKWSNIETSMTDQGTEIFEQIQELYRARLLNGIVPAGMSLSQAKVADYGQHKEDLELFKTYLKKLNDHELAKTIRGLYDRYINGDDAKPFLREDFVKALTKEVTAHPNEVSEQLLNRMGQANFMLKQRTKANGAIPVQLQQRELDQIIANQSKYYDWLAKPNPVEKHRASKPYQLDELLTFRIPYYVGPLITPKEQAESRENVFAWMIRKDPSGNITPYNFDEKVDCPASANMFIQRMKNTDTYLIGEDVLPKRSLLYQKYEVLNELNNVSIDGRRLGADQKQRLIREVFERHSSVTIKQVAENLVAHGDFAKRPEIRGLADEKRFLSSLSTYHQLKKILHEAIDDPTKEHDIENIITWSTVFEDAAIFKTELAKISWLDSDTIKALSNIRYRGWGQFSRKLLDGLKLGNGHTVIQELMLSNHNLMQILTDETLKTTMAELNQDKLKADDIEDVINDAYTSPSNKKALRQVLRVVEDIKHAANGQDPSWLYIETADGPGTAGKRTQSRQKQIQTVYANAAQELIDSAVRGELEDKIADKASFTDRLVLYFMQGGRDIYTGAPLNIDQLSHYDIDHILPQSLIKDDSLDNRVLVNATINREKNNVFASTLFASKMAATWRKWHEAGLISGRKLRNLMLRPDEIDKFAHGFVARQLVETRQIIKLTEQIAAAQYPNTKIIAVKAGLSHQLREELDFPKNRDVNHYHHAFDAFLAARIGTYLLKRYPKLAPFFTYGEFAKVDVKKFREFNFIGALTHAKKNIVAKDTGEIVWDKERDIQELDRIYNFKRMLITHEVYFETADLFKQTIYAAKDSKERGGSKQLIPKKQGYPTQVYGGYTRENTAYLAVVKTVEKKADVYRVVRIATSQVAALKEARAQSTVKERELLKKFLTTKFTKIGKNGKKAITPFDIVIPRVPREQLFHNKRYGFFMVNSDTLMHNYQELWMSRSDQQILSKLVKSAKTVENGQVGRLFENIVEQINKYFPLYDINQFRKKLDQSKDIFSKLPLEGNGTTSGKRETIQNILTGAGTGAKNGDLKNLGIKTPFGFLQVPSGIVLDDDTTLIYQSPTGMLNRIVRLSEL

SEQ ID NO: 513 - protein, 1352 aa, Lactobacillus ruminis
MNDNFDLMRVKGKKGIGVRLYNEGQSAAERRMHRTARRRYGRRKWRLRLLEDFFDEHMAEVDDTFFARLKDSNISPKDDKKYRKSLLFPKSKGVTYQDDGEFYKKYPTMYHLRYALMTEHRKFDLREIYLAFHHMVKYRGNFLYDTSVDSFEAKNLDIKGKFDEINDLLSSYTDFYVDNSNAALVESILLEKNTTRKDKSKKIAKLLHVEDKEKGKNKKAKDLATQISNAVLGLKCNFHLIFELQQKYSFDLCSEKTEENIAKLSEVLDENQKMLLMILKEVQDQVMLNAFVPSGMSLSEAMMQKYDDYGEQLKIYHELEHSVSDDSAAKLRGAYRDYNDNIIKRIDGDNKKDTFYKRVKNILTKISKEYVDQDVLESCGKLKKLIDENKLFIRQRTAANGVLPHQLHQIEMRKIIDNQKEYYPWLAEPNPNEKRRVYSKYKVEELIAFRIPYYVGPLVDPNNADKNKEARFSWMVRKKDGEITPWNFYDKVDWAESANNFIERMKSKDTYLLGEDVVPKESMLYQKYEVLNELNNLRINDSGLSDSFEDVKLKQAIYNDLFKKQKIVKITDLQNYLVQNHKYLVKPKISGLADENRFLSSLSTYSDLKTIFGDKVDDRTYFNDFEKMVEYSTVFEDGHDYNQKLDEYTWLTKEEKYKIGKKRYRGWGKLSKKLLTGLRDKNNHTIMDNLWETNRNFMQIQTADEFSKQIAEENERHLKGSVSDAINDMYTSPANKKAIRQVLRVVDDIQKAMGYAPSSISLEFAREDGPSVRTVSRANRMKSIYEKYASEVSEEVMKDLDGVIKDKKGLNDRLYLYFEQQGKDMYSGHPLDFDKVISGQEYDIDHILPQAVIKDDSLDNRVLTTKALNNDVKSKGVPCRMFNGMHSFWKNLYDKGFISRRKFNNLTTNPENIDKYKMKGFVNRQLVETRQIIKLVANVLNDKYQNDDVDIIEVRAELTHDVRKHFKFYKNRNVNDYHHAFDAYLTSFIGHYLFKKYPNLRPLFDYNDFMKVSDNVFKQLRGNNFLGEFLNKTGDIISTDGNFVLNKEEMINKLNKAYAFKKILVTKEVGQRTGAMFNETRYPAPNSRKAALKYRRMPKPDSLISVKDYKNTDIYGGYSGKNDAYMVIVDMGKQYMVVGVPVRYTEKLDKLRIKHSELYRDELRKVLSRDKTLLDSKGNVKRFDIVLDRVLYGQLIEDGNELFTLGSSKYKRNFRQLFLDKQCIEILDSSATPQPTDEELIWVYDQILDKVDKYFELYDINRQRETLRKGRAAFCSLPNISMKKDDVTKKKILNEILVALHANESESNCEKIGKKVFGRLQVPGGIKLSKEAKLIYQSPTGLFERVVYLKDL

SEQ ID NO: 514 - protein, 1339 aa, Lactobacillus salivarius
MERYHIGLDIGTSSIGWAVIGDDFKIKKKKGKNLIGTRLFNEGATAAERRGFRTQRRRLNRRKWRLKLLEEIFDPYMAEVDEYFFARLKSSNLSPKDSNKKYLGSLLFPDKSDSNFYDKYPTIYHLRRDLMEKDEKFDLREIYLAIHHIVKYRGNFLEKVPAKNYKNSGASIGFLLEEVNSLYKDIIGDESIAILNSEKFEDVEKIILDEETRNLDKQKSVGKLLVEDKKKKNIVTAFSKAIFGYKFNIEDLLLIENDEKNKLTFNDENIDDIFNELSHSLDDKQMDLLTKTREIYFKFKLNMIVPTGYTLSESMIEKYEMHKAHLKMYKEFINTLNTKDRKILKNAYSDYINTEKAKAANAQENFYKTVKKIIKDNNSDTAKKIIVLIDEGNFMPKQRTGENGVIPHQLHQIELDRIIENQAKYYPWLAEANPVEKNRKFAKYKLDELVTFRVPYYVGPLIDKTESNKNEKETKFAWMVRKAKGTITPWNFENLVDRTESANRFIKRMTSKDTYIIGEDVLPASSLLYEKFKVLNELNNIKVNEKKLDIEQKQDIYLNLFTTAKNVTKKSLATYLNCSADSISGLSDGEKFNSSLSSYIDLKAILGNIVDDCNKNEDLEKIIEYSTVFEDGNIYKEKLSEISWLTDEQIEKLSNIHFKGWGRLSKKLLTQITNENGERIIDALWNTSNNFMQIINDESIQAKLAEINGKYAGKSDLEDILSEAYTSPQNKKAIRQVMKVVEDIEKAMQCEPTSISIEFTRKKQKSRLTNTRYKKISDVYEKIADEVISEYELRKLQSELDSNANNMRDRYYLYFMQLGRDMYTGEKINIDELHQRYDIDHILPQSFIKDDSINNRVLTRKDVNNKEKSDKTAADLYAVEMSDFWRKLRKQGLITEQKYKNLLTKSDSIDKYAKKGFIKRQLVETSQVVKLVANILQDKYSDTKIIEVRAKLNSNLREEYKLIKNRAVNDYHHAIDGYLTTFIGQYLYKTYPKLRSYFVYNDFKKLDSNYLKHMKKFNFLWQLQDDKTIDIYDNVNNKFVLNVPEMKKYIQKIYNYKYMLVSKEVTTKNGAFYDQTKYNAKTVNLIPIKKNKPTNIYGGYKGKVSSYMMLVKIRKKKEVIYKFVGVPRLWTDELDRLKDTTERKILLNEIAKNSLSKTEQDFEVILDKVYYGQLIIDGNQKYTLGSSEYKYNAMQLHLSKHALEVLAKENVKDAEITDKDLVSVYEEILSVVNKYFELYDINKFRQKLNEGLEIFRKLPVYNVYESNKIKQVGKFEVLNRILMGLHANAMITDLKVLGIKTKLGQMQVNGGIKLSPDAKLIYQSPTGIFSRAVRVKDLG

SEQ ID NO: 515 - protein, 629 aa, Lactobacillus salivarius
MERYHIGLDIGTSSIGWAVTGDDFKIKRKKGKNLIGTRLFKEGNTAAERRGFRTQRRRLNRRKWRLKLLEEIFDPYMAEVDEYFFARLKDSNLSPKDSNKKYLGSLLFPDISDSNFYDKYPTIYHLRRDLMEKDEKFDLREIYLAIHHIVKYRGNFLENVPAKNYKNSGASIGFLLEEVNNLYKDIVGDENVTILNSEKFEDVEKIILDDGIRNLDKQKGVGKLLVEDKKNKNLVTAFSKAIFGYKFNIEDLLLVEGDEKSKLTFNDENIDDIFNELSHSLDDRRMDLLTKTREIYFKFKLNMIVPTGYTLSESMIEKYEIHKAHLKMYKEFINTLNSKDRKILKNAYTDYINNEKAKAANAQENFYKTVKKTIKDNDSDIVKKIIDLIDEGNFMPKQRTGENGVIPHQLHQIELDRIIENQAKYYPWLAEENPVEKNRKFAKYKLDELVTFRVPYYVGPLVDKTESNKNEKETKFAWMVRKSKGTITPWNFENLVDRTESANRFIKRMTSKDTYIIGEDVLPASSLLYEKFKVLNELNNIKVNEKKLDIEQKQNIYLKLFTTTKNVTKKNLATFLNCSIESISGLSDDKKFNSSLSSYIDLKVILGDIVDDYSKNEDLEKIIEYSTIF

SEQ ID NO: 516 - protein, 897 aa, Lactobacillus salivarius
  misc_feature (822)..(822): Xaa can be any naturally occurring amino acid
MLIESDEKNKLTFNDENIDDIFNELSHSLDDNQMDLLTKTREIYFKFKLNMIVPTGYTLSESMIEKYEMHKAHLKMYKEFINTLNAKDRKILKNAYSDYINNEKAKAANAQENFYKTIKKTIKDNNSDTAKKIIGLIDEGNFMPKQRTGENGVIPHQLHQIELDRIIENQAKYYPWLAEENPVEKNRKFAKYKLDELVTFRVPYYVGPLVDKTESNKNEKETKFAWMVRKAKGTITPWNFENLVDRTESANRFIKRMTSKDTYIIGEDVLPASSLLYEKFKVLNELNNIKVNKKKLDVEQKQHVYLDLFTTRKNVTKDNLATSLNCDVESITGLSDNEKFNSSLSSYIDLKAILGNAVDDCNKNKDLEKIIEYSTIFEDGNIYKEKLSEISWLTDEQIEKLSNIHFKGWGRLSKKLLTQITNENGERIIDALWNTSNNFIQIISDESIQAKLAEINGEYADKSNLEDILDEAYTSPQNKKAIRQVMKVVEDIEKAMKCKPTSIAIEFTRRKGKSKLTNTRYKKISETYEKITDELISEYELGKLQSKLDSKANNMRDIYYLYFMQLGRDMYTGEKINIDELHQYYDIDHIFPRSFIKDNSLNNRVLTRKEINNNEKADRTAADLYAVKMGDFWRKLRKQGLITEKKYKNLLTRTDSIDKYTKQSFIKRQLVETSQVVKMAANILQDKYSNTKIIEVRARLNSDLRKEYELIKNREVNDYHHAIDGYLTIFIGQYLYKTYPKLRSYFVYDDFKKLDSNYLKHMDKFNFIWKLEDKKAEDVYDNVNNEFILNVPKMKDYIQKIYNYKYMLISKEVTTESGAFYXZTKYNAKTINLIPIKKDKPTNIYGGYKGKVSSYMMLVKIQKKKEVIYKFVGVPRLWTDELDRLIDTDEKKALLKK

SEQ ID NO: 517 - protein, 1419 aa, Lactobacillus sp.
MAKPQNYTIGLDIGTNSVGWTVTDDQNNILRIKSKKAIGARLFEEGKVAAERRSFRTTRRRLSRRKWRIKLLEELFDEEISKVDPNFFARSHESWISPKDKRERYSAIVFPTPEEDKKFHNEYPTIYHLRDRLMKDDQKHDIREIYVAIHHIMKYRGNFLHDESIETYRSGMSSLGGGDERTILNTKILDDLNDAFADNLATQGISVNSASADQINEIVTSGHLNVDSQKAIAKLLLPTTLSSDDKKQDKKIKKLATDAAKNVASAWLGYKANFAAILNIQEVDKDKKKIYSFALQGADEEDKVETLESVLSQDQIEIVDRIIRIRHAIVLGEIIPVGMTLSEAMIEKYDQHAKDLKNLKTVIRNLKDRKNAVKLQAIYDLYVNNRHADTAKAMKLAGVKKRTELLEPEEFNKSIEKLLDDSPVSAEIKKRIAEKDFLPLQRSNSNGVIPNQLHQIELDEIIKKQSKYYPFLGETNEHASADVARKAPTKLDQLLTFRVPYYVGPLITKEEQEEQDGHSFAWMIRKNPKDHEKITPWNFDEKVDRMASATQFIKRMTTKDTYLLGEDVLPSSSLKYQLFTVLNELNNLRINHKKLTREEKEQVIEDLFKKYKTVKADKFKNYWQKGHAGLDVKIQGMADPEKFNSTMSTYIDLQKIFGDQLDDAQRQNDFEKIIEYSTIFEDRKILGEKLRADFVWLSEDQIKRLCRLRLQGWGRLSLKLLTRLTDADGQNVLERLLNSNDNFMQIVKDPVIKAKIEQKNQKLLRADWSENATESILDEAYTSPQNKKAIRQVMRVVHDIVKACDGNLPAKFAIEFARSQDDDPKRTVARADRLQKIYAQISDEVVSQGVKDQLSGMKSLKDRYYLYFMQGGRDAYTGKPLNIDRLSDYDIDHIMPQSFIKDDSLDNRVLVTRAVNNQKSDNVPVLLYGNHLVADLGITIREMWDRWQKSGMISKRKLANLLTDPATLSEYRAEGFINRQLVETSQVIKLTATILQSEFPDSKIIEVPAKYNSILRKQFDLYKSREVNDYHHAIDAYLSTIVGNYLYQVYPNLRRLFVYGEFKKFSHGEEESSHQAVRRVKSMNFLDDLLRGKHGDDIYCRVTGEVIFSRKDIISKLKQAYSFKQMLVTQEVFTKKSALFDQTVYPSPARDSKTRSGLIPRKQGMDTEIYGGYSGNKDAYFVLAQVVKSKGHTLQVVGVPIRALRALANCSNYSEQLLKIVKAQVLFNKKTGKAKKGISDVRILLDKIPYRQPVLDGSAFYMLGSSTYKYNLKQISLSQQSMKYILDYIDDPNFNKHEMTKIDQQNEKECLLSVYDEILDKMDKYLSLYDINGFRKKLHVGRDKFIKLEVEKQAEAIKNVLRGFHANSDMTKLSDLGLSTSLGFMQASDGIKLSDNAVFIYQSPTGLFERRVKVSDLLK

SEQ ID NO: 518 - protein, 1289 aa, Lactobacillus versmoldensis
MRRRYRRRRNRLNWLDELFADELAKIDPSFLLRMKNSWVSKKESTRKRDPYNLFIDEKYNDVDYFNQYPTIFHLRKELITEDKKVDIRLIYLAIHNIIKYRGNFTLENQNFDISQLSSNFSQQISDFFALFSDFGVIMPEDFDPDKISDILLNPNLSPSGKVSEAIATISPKTNVKAKIKIILLLLVGNNGDLKKLFDLETTEKIAVKLSSRHIDSELPIILSELNEQQENIITIANSIFGSIILKDFLGDETSISAAKVISFEDHKQDLQKLKTMWRETSNKEAVKAGKKAYEDYIGHEDSETFYKKIKKFLEKAQPVDLANKALAEIELENYLPKQRNRNNTVIPYQLNENELIAILDHQEKYYPFLKENRDKILSLLTFRIPYYVGPLQDSNNNRFSWMTRKASGAIRPWNFSEKVNVEQSSNDFIKRMRSTDTYLIGEPVLPKKSLIYQCYEVLSELNNTRVKDGSSNPKRLDVTIKQRIYNEIFKNQKSVSVKVLQNWLIKESYFKSPEISGLADKKKYLSSLSTYIDFKKIFGQRFVDDPVNSPQLEELAEWLTLFEDKKILLIKLQNSKYSYDQATINKLSTMRYQGTGKLSKKLLVDLKTTKKSIGKSGAESLSILDLMWSTKDNFMQIIHDADYTFEQQIKEFNYDTEDELTPLEKVANLHGSPALKRGLNQSIKVVADIVKFMGHDPEKIFIEFTRSDDFSKLTISRYRRIKKQYLEIAKAIKKIPAEFKDIKEYQTQLEENKGKLASERLMLYFLQCGHSLYSNKPIDLNMINSSKYHVDHILPQSYIKDDSLENKALVLASENENKIDNMLISHDIIATNLPRWQALKDQNLMGSKKFADLTRTTVTENQKKGFIQRQLVQTSQIVKNITLILNDLYKNTSCIETRATLSSEFRKAFSNFDETTYHYQFPEFVKNRDVNDFHHAQDAFLACVIGEYQLKKYPKDNLRLVYDQYSKFLDSLKKDTRKKNGRMPRYTQNGFIIGSMFNGKTYVDDNGEIIWDQKIKESIRKTFNYHQFNVVRQTIEQHGKLFNDTIQPHSDRYKLIPLKTNRDPAIYGGYNNDNNAYSVVLDVDGKKKINGIPIRIANQLKSDELDLSSWLENNIKHKKPMTILIDKVPKYQRIINEETGDLLITSANEVINNVQLFLPSMYTALISLLDSTKTEMYSKLLSNYEANILIDIYDYLLTKLKNNYPLYRKEWAKLAEHRDDFIESDLVTQASTLQQLIKFMHADPSNVNLKFGNFKGNRFGRKNGNIKLSKTDFIYESPTGLFKSIKHID

SEQ ID NO: 519 - protein, 1372 aa, Legionella pneumophila
MESSQILSPIGIDLGGKFTGVCLSHLEAFAELPNHANTKYSVILIDHNNFQLSQAQRRATRHRVRNKKRNQFVKRVALQLFQHILSRDLNAKEETALCHYLNNRGYTYVDTDLDEYIKDETTINLLKELLPSESEHNFIDWFLQKMQSSEFRKILVSKVEEKKDDKELKNAVKNIKNFITGFEKNSVEGHRHRKVYFENIKSDITKDNQLDSIKKKIPSVCLSNLLGHLSNLQWKNLHRYLAKNPKQFDEQTFGNEFLRMLKNFRHLKGSQESLAVRNLIQQLEQSQDYISILEKTPPEITIPPYEARTNTGMEKDQSLLLNPEKLNNLYPNWRNLIPGIIDAHPFLEKDLEHTKLRDRKRIISPSKQDEKRDSYILQRYLDLNKKIDKFKIKKQLSFLGQGKQLPANLIETQKEMETHFNSSLVSVLIQIASAYNKEREDAAQGIWFDNAFSLCELSNINPPRKQKILPLLVGAILSEDFINNKDKWAKFKNFWNTHKIGRTSLKSKCKEIEEARKNSGNAFKIDYEEALNHPEHSNNKALIKIIQTIPDIIQAIQSHLGHNDSQALIYHNPFSLSQLYTILETKRDGFHKNCVAVTCENYWRSQKTEIDPEISYASRLPADSVRPFDGVLARMMQRLAYEIAMAKWEQIKHIPDNSSLLIPIYLEQNRFEFEESFKKIKGGSSDKTLEQAIEKQNIQWEEKFQRIINASMNICPYKGASIGGQGEIDHIYPRSLSKKHFGVIFNSEANLIYCSSQGNREKKEEHYLLEHLSPLYLKHQFGTDNVSDIKNFISQNVANIKKYISFHLLTPEQQKAARHALFLDYDDEAFKTITKFLMSQQKARVNGTQKFLGKQIMEFLSTLADSKQLQLEFSIKQITAEEVHDHRELLSKQEPKLVKSRQQSFPSHAIDATLTMSIGLKEFPQFSQELDNSWFINHLMPDEVHLNPVRSKEKYNKPNISSTPLFKDSLYAERFIPVWVKGETFAIGFSEKDLFEIKPSNKEKLFTLLKTYSTKNPGESLQELQAKSKAKWLYFPINKTLALEFLHHYFHKEIVTPDDTTVCHFINSLRYYTKKESITVKILKEPMPVLSVKFESSKKNVLGSFKHTIALPATKDWERLFNHPNFLALKANPAPNPKEFNEFIRKYFLSDNNPNSDIPNNGHNIKPQKHKAVRKVFSLPVIPGNAGTMMRIRRKDNKGQPLYQLQTIDDTPSMGIQINEDRLVKQEVLMDAYKTRNLSTIDGINNSEGQAYATFDNWLTLPVSTFKPEIIKLEMKPHSKTRRYIRITQSLADFIKTIDEALMIKPSDSIDDPLNMPNEIVCKNKLFGNELKPRDGKMKIVSTGKIVTYEFESDSTPQWIQTLYVTQLKKQP

SEQ ID NO: 520 - protein, 907 aa, Leptospira inadai
MAKSIEEIRSIQNEFVVEYSILLKKIKKGEIDKKNDVYKVYQNTIKSSERLEQVLKERLGFQNVSKSYFNNPYSIAQLYNLISVDRSGFSKVCRSCQEENHWRSTLIDTDRGPQAQASKQVSDTGRPFDGQLAMLLDRIAFEIVKLKRIEIERLLSNKNSSKIEVVEIPLLIEENSFNFRYELAELKKLSKKKKDQLKKSVEEFDTKLNSKQERIKAASRELCPYTGKKISKGEIDHILPRSWTQKQFGTALNAEANLIYASREGNQSKGNREYGLNDLDEKYLNIIFGTKEVDSIQRNISDTIDRLDIERGTTRIVFDRLAPNERDCLRHALFIKSLRPKVFELLSGQLKARVNGTQLYLAKRIRSLLLKNQDFITKSLIIKVPSFSFYEPRTVDLPYMRKELAEKFPNLGKQNPQPTGSHIIDAAMVMAYAVETDSGNLSFGSKDKSEGFDSESLSRFLPSNIQFLSIKSKDKTDSKYPYKKPLFKDGVFGERFLPILIAEKGLRVGYTLENSLEVNSENPEEFFNVLKPYLLFKRKPIESNYQTLVAFAQKDKRGYIVLPVNKPKALESISQRKSDPHTSILKNILYTVSRESIPSLIFDKNTLIPEIKSNKVNWGDKLEKKFRIKIEIKLYGKKIADGFIRYPGKTEWEKLLLTEPLKGLVKNKTLTPKWFDSLENLAGLDDHFKDTSNPEAKHKRKSNHYALPVPKGPSGGFRIRRNSFDGYKVYQLYSVDGNSFHAFKIENGWTGKTLLLDIYQNSGNLHSLDYDYENTDISQTALFSKFYKIEFSKEETQKINSKGIKSLYVAPGSSSRQYIRVIFDKQTFSKFIKFQSKFWEFDLITPLPKDKAKDLIESILKIFPEDLRPKKPRNDIHIQNISHDSVQVEYIADGKTQGFGQYFINQN

SEQ ID NO: 521 - protein, 418 aa, Leptospira inadai
MILKSPIAIDLGAKNTGIVYTTYQPNALPTEIHGATIISDNLKLSQVDRRAKRHQRRNYTRMKLARRLVYLIIRYHYRIPEQDLTPEVKTSLQSLLTRRGYTFQSIETEGNELGQAPWGEIEDYFPNVQDYEKSLPIQTVLYHFFSSENLELNKLVPSKEPETKEDKNILKYIREQKEAFESEQNNGARHRLKYFEEIKEDFPRKIKLMECLQKNKIEEKKFLNLIQNISNLQIKPLRAYFNDKDMKEKEIWEPRRLHTYIARWIRSWHIDPKNSSKRLIRQKLLSQLENGKLKIIRDTSIYSPSKDIISFLEEIDPKDTIPPYEDQNNRHPPRCQNLWLDGKILDRYFPGWEQSLWKLIRNEKNNPFEQLITKDFRTDDTISEGKSLSEQIQIYERSHSNIKLDVRAVILQRFLDRS

SEQ ID NO: 522 - protein, 125 aa, Leptospira inadai
MSAYDRSANLDPWSLRLQGKAKKEIKTTESLSKTDLQKASDAYEKIKEILSESDTDQFIKLANRYYLEVADIKKGMWLPTAPERKHKEIPKSIAHEENQDISLFHKCNTKTGSKKRISQVSLEMF

SEQ ID NO: 523 - protein, 1355 aa, Leuconostoc gelidum
MTYSIGLDIGTGSVGWAVIGDDYRLKRAKGKNLIGVRLFDSATTAAERRGYRTTRRRLSRRHWRLRLLNDIFASDLAEQDENFLPRLKYSWVNPDDEQNPQLNSDVANGALFGSSETDKAFHKNYPTIYHLRHELMTDTAKHDLREVYLAIHHIVKYRGNFLNTADKINAENSFNVDLFIAALDEYNEFLETPITSIKDAQLFSDKLTDINARNKSVRVENAMSETYDDKSKIFKAILTALVGNTANFQTIFDLSDLEKDEAKNFKFKLDLEDVETKLDVVRAKLSDEQNAFLEAVLIAYDGITLKMILGDYKSISQSMIESYKSHQRDWKYIKNNVRLNEQKIEPDKNSVKFFKLDPKKLIYPSNLAYLQVISSNEDEHRKGLDYFKTAIQDADILQRIENDTFLPRQRTKRNGVLPYQLHLAELEQIIKKQSKYYPFLANIYTQDNKTENKLIGLLKFRVPYYVGPLVEAEKVTGDGKNHWLIKKELQENTPITPFNFDDVVDKDKSGEQFIKRITGTDSYLIGEPTLPENSLLYQKYNVLQELNNVRNERHQRLPIKVKQDIFEHVFKIDKNVNAKKVMAYLKLNGYGDFQIAGLSDTRTGKFNSNLSSYNYFVDLLGREKTEKIREDRLEEIIEIQTVFEDKILVAKRLSNLDFLTPQEKSKLSAKHYTGWGRLSQKLLTTQFIKTALSEAGDIIPQSHSIIDLLYYTDKNLMEILNDKTFNVRNWLTEQNKGTESGNSLYDQIDALAGPKDIKRGITQVFSIIDDIKKAMGSNPETVYLEFARETQTSRLTNSRLNRVQEIYNSPELKTEFAYLAKKLEAETKESIHDDRLYLYYLQEGRDMYTGKEIPFDQISSNYDIDHIIPQAFTKDDSLDNRVLVNRATNARKSNSPTFTNDIIDNRKSWWQSLVKRGLMSKEKFERLTDKRKTFSENQTNHFIARQLVETRQIIKNVADLIKNNYDGTQAVAIRASLTGEMRRYLDWPKNRDMNDYHHAHDALMMATVGKYVDRRGFFDNGSVSDGAGNAYNLYTKDWLVAARVGTRNDSQRVNPYGFIVGSMNSKAVRQQVNKETGEIVWGNENLDYLRHVLSYKKILVTRRLSGSSGRLYAETLFSPNPKAKLIAQKANRSVALYGGFTKAESAYTALVEFNKKGDRSYKLIKVPMAIANRVNDKQITVTAYIASLNLRDFSRVVLEHLPLGTLIRESDGSEFYAASSEYKHNAKELWAPKEILRSSKKLDKATADNLIDIFDFLTNDKTISNFKFYEKDLLHLKNVRDKFVEASDEIKIKVLSDVIYELHNDAGWRDPFKHIQEKPAWTMLQVKGGIKLSEKAAIVYQSPTGLFETITIVGE

SEQ ID NO: 524 - protein, 883 aa, Leuconostoc pseudomesenteroides
MIGVRLFEGADTAAERRGYRTTRRRLSRRRWRLRLLNDIFASELSKIDENFLPRLKYSWVNKNDTDNVHFGVGVFDNSEQEKAFYQDYPTIYHLRQKLMTDNRQHDLREVYLAIHHIVKYRGHFLNSGEISANSSFDAQKFLELLREFDNTFYPDAVKFLNLDQLDLPDKISSEISDSKISKSERVDRVLQHVQLANSGAKKILKAILNAVVGNSVDSVAMFSLSDLDKEEKKKINHPVTDSKPFKYSDKEVEAKLDELSNLLQDEQKIEFLSLLKLSFDGLTLKMLLGNAKSVSEAMVERYKVHKDDLKFIKENILNSFSKDKKKEFDKYYEAHLAEKDVDNVDKYFKKIIDDSIISKDKKIELLQKIDDHDFLPSQRSKINGAIPHQLHRNELDKIISQQSKYYPFLADSYTQNGKTETKLAGLVNFRVPYYVGPLVSKENADRNNPDGGQNHWVEFKENTSLSNLTPWNFNEIVDKDKSAAKFIERLTGMDTYLIGEPTLPQNSLLYQKYNVLQELNNIRVDNHKLDVKIKQDVFEHLFKTQNSVSAKDVKNYLIANGYAAPSIQITGLSDTNEKTFNSKLSSYNYLVDKLGRTFVESVKSDVLEKIIELQTVFEDKTVLLRQLSMISELTLAQANQLAEKHWTGWGRLSRKLLSSKVVDVNKITNSTFYPATSRQTIIDTLYHTQLNLMEIINNAEDLYGVRQWISEQNKSDSSDTNDVYDQIQELAGDKKIKRGITQSFRILDDIVKAMGGEPERVYLEFARENQQSGVSFSRKNLLSKLYENDSLKQTFKELKSQLESETKENLQNDRLYLYYLQQGRDMYSNDELNIDQLSSYDIDHIIPQAYTKDNSFDNRVLVSSKANRLKRMLLWYPVKLSKK

SEQ ID NO: 525 - protein, 468 aa, Leuconostoc pseudomesenteroides
MKDQGFISKRKFENLTRRGDFSEQQKERFIARALVETRQIIVNVSSLIDSHFNHTKAVAVKSNMTTDMRHYTKVPKNRDINDYHHAHDALFVATVGQYIENKGFMKAGKLSDSVGNEYNRYTKKWIETARKNTNYGRVNPFGFVVGSMQTATRGKLDYETGELKVVKNNYWSKDDLDYLLKVVSYKKILVTTKLQDNKGAMYDANLISAKGSGKKKAQLQISKSKNIDLYGGFNKLQNEYSVLILNHDEYRWLSIPMYARNSSEQYLHDKYPDAKVILNHILVGQPILLSNSSDPQKSKFASLRIATGGDYHNNFEFVPSVDVKKILDNIYLNHSVTDDEYKKVFESLLATLHDKFVFGIHQVMYNKIFDNKYLFDKMPDEAKRNVINSLLKFMNISKNQLGAVGKIGGKVNGVLYGFKTETEKGTSAGQLISNGKMQPHDIFIFQSPTGIFERRVTVAELANVIKDE

SEQ ID NO: 526 - protein, 1103 aa, Listeria innocua
LKLYPGEKSTGMFAQFISLIVGSKGNFQKPFDLIEKSDIECAKDSYEEDLESLLALIGDEYAELFVAAKNAYSAVVLSSIITVAETETNAKLSASMIERFDTHEEDLGELKAFIKLHLPKHYEEIFSNTEKHGYAGYIDGKTKQADFYKYMKTTLENIEGADYFIAKIEKENFLRKQRTFDNGAIPHQLHLEELEAILHQQAKYYPFLKENYDKIKSLVTFRIPYFVGPLANGQSEFAWLTRKADGEIRPWNIEEKVDFGKSAVDFIEKMTNKDTYLPKENVLPKHSLCYQKYLVYNELTKVRYINDQGKTSYFSGQEKEQIFNDLFKQKRKVKKKDLELFLRNMSHVESPTIEGLEDSFNSSYSTYHDLLKVGIKQEILDNPVNTEMLENIVKILTVFEDKRMIKEQLQQFSDVLDGVVLKKLERRHYTGWGRLSAKLLMGIRDKQSHLTILDYLMNDDGLNRNLMQLINDSNLSFKSIIEKEQVTTADKDIQSIVADLAGSPAIKKGILQSLKIVDELVSVMGYPPQTIVVEMARENQTTGKGKNNSRPRYKSLEKAIKEFGSQILKEHPTDNQELKNNRLYLYYLQNGKDMYTGQDLDIHNLSNYDIDHIVPQSFITDNSIDNLVLTSSAGNREKGNDVPPLEIVQKRKVFWEKLYQGNLMSKRKFDYLTKAERGGLTEADKARFIHRQLVETRQITKNVANILHQRFNYGKDDHGNTMKQVRIVTLKSALVSQFRKQFQLYKVRGVNDYHHAHDAYLNGVVANTLLKVYPQLEPEFVYGDYHQFDWFKANKATAKKQFYTNIMLFFAQKDRIIDENGEILWDKKYLDTVKKVMSYRQMNIVKKTEIQKGEFSKATIKPKGNSSKLIPRKTNWDPMKYGGLDSPNMAYAVVIEYAKGKNKLVFEKKIIRVTIMERKAFEKDEKAFLEEQGYRQPKVLAKLPKYTLYECEEGRRRMLASANEAQKGNQQVLPNHLVTLLHHAANCEVSDGKSLDYIESNREMFAELLAHVSEFAKRYTLAEANLNKINQLFEQNKEGDIKAIAQSFVDLMAFNAMGAPASFKFFETTIERKRYNNLKELLNSTIIYQSITGLYESRKRLDD

SEQ ID NO: 527 - protein, 1337 aa, Listeria innocua
MKNMKKPYTIGLDIGTNSVGWAVLTDQYDLVKRKMKIAGDSEKKQIKKNFWGVRLFDEGQTAADRRMARTARRRIERRRNRISYLQGIFAEEMSKTDANFFCRLSDSFYVDNEKRNSRHPFFATIEEEVEYHKNYPTIYHLREELVNSSEKADLRLVYLALAHIIKYRGNFLIEGALDTQNTSVDGIYKQFIQTYNQVFASGIEDGSLKKLEDNKDVAKILVEKVTRKEKLERILKLYPGEKSAGMFAQFISLIVGSKGNFQKPFDLIEKSDIECAKDSYEEDLESLLALIGDEYAELFVAAKNAYSAVVLSSIITVAETETNAKLSASMIERFDTHEEDLGELKAFIKLHLPKHYEEIFSNTEKHGYAGYIDGKTKQADFYKYMKMTLENIEGADYFIAKIEKENFLRKQRTFDNGAIPHQLHLEELEAILHQQAKYYPFLKENYDKIKSLVTFRIPYFVGPLANGQSEFAWLTRKADGEIRPWNIEEKVDFGKSAVDFIEKMTNKDTYLPKENVLPKHSLCYQKYLVYNELTKVRYINDQGKTSYFSGQEKEQIFNDLFKQKRKVKKKDLELFLRNMSHVESPTIEGLEDSFNSSYSTYHDLLKVGIKQEILDNPVNTEMLENIVKILTVFEDKRMIKEQLQQFSDVLDGVVLKKLERRHYTGWGRLSAKLLMGIRDKQSHLTILDYLMNDDGLNRNLMQLINDSNLSFKSIIEKEQVTTADKDIQSIVADLAGSPAIKKGILQSLKIVDELVSVMGYPPQTIVVEMARENQTTGKGKNNSRPRYKSLEKAIKEFGSQILKEHPTDNQELRNNRLYLYYLQNGKDMYTGQDLDIHNLSNYDIDHIVPQSFITDNSIDNLVLTSSAGNREKGDDVPPLEIVRKRKVFWEKLYQGNLMSKRKFDYLTKAERGGLTEADKARFIHRQLVETRQITKNVANILHQRFNYEKDDHGNTMKQVRIVTLKSALVSQFRKQFQLYKVRDVNDYHHAHDAYLNGVVANTLLKVYPQLEPEFVYGDYHQFDWFKANKATAKKQFYTNIMLFFAQKDRIIDENGEILWDKKYLDTVKKVMSYRQMNIVKKTEIQKGEFSKATIKPKGNSSKLISRKTNWDPMKYGGLDSPNMAYAVVIEYAKGKNKLVFEKKIIRVTIMERKAFEKDEKAFLEEQGYRQPKVLAKLPKYTLYECEEGRRRMLASANEAQKGNQQVLPNHLVTLLHHVANCEVSDGKSLDYIESNREMFAELLAHVSEFAKRYTLAEANLNKINQLFEQNKEGDIKAIAQSFVDLMAFNAMGAPASFKFFETTIERKRYNNLKELLNSTIIYQSITGLYESRKRLDD

SEQ ID NO: 528 - protein, 953 aa, Listeria ivanovii
MKKMLANIDGADYFIDQIEEENFLRKQRTFDNGTIPHQLHLEELEAILHQQAKYYPFLRKDYEKIRSLVTFRIPYFIGPLANGQSDFAWLTRKADGEIRPWNIEEKVDFGKSAIDFIEKMTNKDTYLPKENVLPKHSLCYQKYMVYNELTKIRYIDDQGKTHHFSGQEKQQIFNGLFKQQRKVKKKDLERFLYTINHIESPTIEGVEDAFNSSFATYHDLQKGGVTQEILDNPLNADMLEEIVKILTVFEDKRMIKEQLQSFSDVLDGTILKKLERRHYTGWGRLSAKLLTGIRDKHSHLTILDYLMNDDGLNRNLMQLINDSNLSFKSIIEKEQVSTADKGIQSIVAELAGSPAIKKGILQSLKIVDELVGIMGYPPQTIVVEMARENQTTGKGKNNSKPRFISLEKAIKEFGSQILKEHPTDNQCLKNDRLYLYYLQNGKDMYTGKELDIHNLSNYDIDHIIPQSFITDNSIDNRVLVSSTANREKGDNVPLLEVVRKRKAFWEKLYQAKLMSKRKFDYLTKAERGGLTEADKANFIQRQLVETRQITKNVANILYQRFNCKQDENGNEVEQVRIVTLKSTLVSQFRKQFQLYKVREVNDYHHAHDAYLNGVVANTLLKVYPQLEPEFVYGDYHQFDWFKANKATAKKQFYTNIMRFFAKENQIIDKNGEILWDNRYLDTIKKVLSYRQMNIVKKTEIQKGEFSNATVNPKGNSSKLISRKADWNPIKYGGFDGSNMAYSIVIEYEKRKKKTVIKKELIQINIMERVAFEKDQKAFLEEKGYYSPKVLTKIPKYTLYECENGRRRMLGSANEAQKGNQMVLPNHLMTLLYHAKNCEANDGESLAYIEMHREMFAELLAYISEFAKRYTLANDRLEKINMFFEQNKKGDIKVIAKSFDKLKVFNAFGAPRDFEFFETTIKRKRYYNIKELLNATIIYQSITGLYEARKRLED

SEQ ID NO: 529 - protein, 232 aa, Listeria ivanovii
MMSKLILGLDIGISSVGWGVLDESTNEVVDAGVRLFEEATRNGNEDRRGFRSARRLKRRRQHRLERAKGLIENNGFSCTDINKFNPYQARYNAIFGEVTKDELAAALFHLVKRRGTTIDAPEEEVKDVENELSTKMQLEKNAKKLATKYDYICEIQLEKLKENKVVRDHENRFRTEDYVKEARAILENQQEYYPEVTNEFIESYMALIETRRMYYDGPGSEKSPTPYGQYFI

SEQ ID NO: 530 - protein, 300 aa, Listeria monocytogenes
DDGLNRNLMQLINDSNLSFKSIIEKEQVSTTDKDLQSIVADLAGSPAIKKGILQSLKIVDELVSIMGYPPQTIVVEMARENQTTVKGKNNSRPRYKSLEKAIKEFGSQILKEHPTDNQELRNNRLYLYYLQNGKDMYTGQELDIHNLSNYDIDHIVPQSFITDNSIDNLVLTSSAGNREKGDDVPPLEIVRKRKVFWEKLFQGNLMSKRKFDYLTKAERGGLTEADKATFIHRQLVETRQITKNVANILHQRFNNETDNHGNNMEQVRIVMLKSALVSQFRKQFQLYKVREVNDYHHAHD

SEQ ID NO: 531 - protein, 782 aa, Listeria monocytogenes
  misc_feature (722)..(722): Xaa can be any naturally occurring amino acid
IFNDLFKQKRKVKKKDLELFLRNINQIESPTIEGLEDSFNASYATYHDLLKVGMKQEILDNPLNTEMLEDIVKILTVFEDKRMIKEQLQQFSDVLDGVVLKKLERRHYTGWGRLSAKLLVGIRDKQSHLTILEYLMNDDGLNRNLMQLINDSNLSFKSIIEKEQVSTTDKDLQSIVADLAGSPAIKKGILQSLKIVDELVSIMGYPPQTIVVEMARENQTTVKGKNNSRPRYKSLEKAIKEFGSQILKEHPTDNQELKNNRLYLYYLQNGKDIYTGQELDIHNLSNYDIDHIVPQSFITDNSIDNLVLTSSAGNREKGDDVPPLEIVRKRKVFWEKLYQGNLMSKRKFDYLTKAERGGLTEADKARFIHRQLVETRQITKNVANILHQRFNNETDNHGNTMEQVRIVTLKSALVSQFRKQFQLYKVREVNDYHHAHDAYLNGVVANTLLKVYPQLEPEFVYGEYHQFDWFKANKATAKKQFYTNIMLFFAQKERIIDENGEILWDKKYLETIKKVLDYRQMNIVKKTEIQKGEFSKATIKPKGNSSKLIPRKENWDPMKYGGLDSPNMAYAVIIEHAKGKKKIVIEKKLIQINIMERKMFEKDEEAFLEEKGYRHPKVLTKLPKYTLYECEKGRRRMLASANEAQKGNQLVLSNHLVSLLYHAKNCEASDGKSLKYTEAHRETFSELLAQVSEFATRYTLADANLSKINNLFEQNKEGDIKXIAQSFVDLMVFNAMGAPASFKFFEATIDRKRYTNLKELLSSTIIYQSITGLYESRKRLDD

SEQ ID NO: 532 - protein, 1334 aa, Listeria monocytogenes; identical to SEQ ID NO: 114

SEQ ID NO: 533 - protein, 1334 aa, Listeria monocytogenes
MKNPYTIGLDIGTNSVGWAVLTDQYDLVKRKMKVAGNSDKKQIKKNFWGVRLFDDGQTAVDRRMNRTARRRIERRRNRISYLQEIFAVEMANIDANFFCRLNDSFYVDSEKRNSRHPFFATIEEEVAYHKNYRTIYHLREELVNSSEKADLRLVYLALAHIIKYRGNFLIEGALDTKNTSVDEVYKQFIQTYNQVFMSNIEEGALAKVEENTEVASILAGKFTRREKFERILRLYPGEKSTGMFAQFISLIVGNKGNFQKVFNLVEKTDIECAKDSYEEDLEALLAIIGDEYAELFVAAKNTYNAVVLSSIITVTATETNAKLSASMIERFDAHEKELGELKAFIKLHLPKQYQEIFNNAEIDGYAGYIDGKTKQVDFYKYLKTTLENVEGADYFITKIEEENFLRKQRTFDNGVIPHQLHLEELEAILHQQAKYYPFLREGYDKIKSLVTFRIPYFVGPLANGQSEFAWLTRKDDGEIRPWNIEEKVDFGKSAVDFIEKMTNKDTYLPKENVLPKHSLCYQKYMVYNELTKIRYIDDQGKTNYFSGREKQQIFNDLFKQKRKVKKKDLELFLRNINHIESPTIEGLEDSFNASYATYHDLLKVGLKQEILDNPLNTEILEDIVKILTVFEDKRMIKEQLEQFSDVLDGVVLKKLERRHYTGWGRLSAKLLVGIRDKQSHLTILDYLMNDDGLNRNLMQLINDSNLSFKSIIEKEQVSTTDKDLQSIVADLAGSPAIKKGILQSLKIVDELVSIMGYPPQTIVVEMARENQTTGKGKNNSKPRYKSLEKAIKDFGSQILKEHPTDNQELKNNRLYLYYLQNGKDIYTGQELDIHNLSNYDIDHIVPQSFITDNSIDNLVLTSSAGNREKGGDVPPLEIVRKRKVFWEKLYQGNLMSKRKFDYLTKAERGGLTEADKARFIHRQLVETRQITKNVANILHQRFNKETDNHGNTMEQVRIVTLKSALVSQFRKQFQLYKVREVNDYHHAHDAYLNGVVANTLLKVYPQLEPEFVYGEYHQFDWFKANKATAKKQFYTNIMLFFAQKERIIDENGEILWDKKYLETIKKVLDYRQINIVKKTEIQKGEFSKATIKPKGNSSKLIPRKENWDPMKYGGLDSPNMAYAVIIEHAKGKKKIVIEKKLIQINIMERKMFEKDEEAFLEEKGYHQPKVLTKLPKYTLYECEKGRRRMLSSANEAQKGNQLVLSNHLVSLLYHAKNCEASDGKSLKYIEAHRETFSELLAQVSEFATKYTLADANLSKINNLFEQNKEGDIKAIAQSFVDLMAFNAMGAPASFKFFEATIDRKRYTNLKELLSSTIIYQSITGLYESRKRLDD

SEQ ID NO: 534 - protein, 1334 aa, Listeria monocytogenes
MKNPYTIGLDIGTNSVGWAVLTDQYDLVKRKMKVAGNSDKKQIKKNFWGVRLFDDGQTAVDRRMNRTARRRIERRRNRISYLQEIFAVEMANIDANFFCRLNDSFYVDSEKRNSRHPFFATIEEEVAYHKNYRTIYHLREELVNSSEKADLRLVYLALAHIIKYRGNFLIEGALDTKNTSVDEVYKQFIQTYNQVFMSNIEEGALAKVEENTEVASILAGKFTRREKFERILRLYPGEKSTGMFAQFISLIVGNKGNFQKVFNLVEKTDIECAKDSYEEDLEALLAIIGDEYAELFVAAKNTYNAVVLSSIITVTATETNAKLSASMIERFDAHEKELGELKAFIKLHLPKQYQEIFNNAEIDGYAGYIDGKTKQVDFYKYLKTTLENVEGADYFITKIEEENFLRKQRTFDNGVIPHQLHLEELEAILHQQAKYYPFLREGYDKIKSLVTFRIPYFVGPLANGQSEFAWLTRKDDGEIRPWNIEEKVDFGKSAVDFIEKMTNKDTYLPKENVLPKHSLCYQKYMVYNELTKIRYIDDQGKTNYFSGREKQQIFNDLFKQKRKVKKKDLELFLRNINHIESPTIEGLEDSFNASYATYHDLLKVGLKQEILDNPLNTEILEDIVKILTVFEDKRMIKEQLEQFSDVLDGVVLKKLERRHYTGWGRLSAKLLVGIRDKQSHLTILDYLMNDDGLNRNLMQLINDSNLSFKSIIEKEQVSTTDKDLQSIVADLAGSPAIKKGILQSLKIVDELVSIMGYPPQTIVVEMARENQTTGKGKNNSKPRYKSLEKAIKDFGSQILKEHPTDNQELKNNRLYLYYLQNGKDIYTGQELDIHNLSNYDIDHIVPQSFITDNSIDNLVLTSSAGNREKGGDVPPLEIVRKRKVFWEKLYQGNLMSKRKFDYLTKAERGGLTEADKARFIHRQLVETRQITKNVANILHQRFNKETDNHGNTMEQVRIVTLKSALVSQFRKQFQLYKVREVNDYHHAHDAYLNGVVANTLLKVYPQLEPEFVYGEYHQFDWFKANKATAKKQFYTNIMLFFAQKERIIDENGEILWDKKYLETIKKVLDYRQINIVKKTEIQKGEFSKATIKPKGNSSKLIPRKENWDPVKYGGLDSPNMAYAVIIEHAKGKKKIVIEKKLIQINIMERKMFEKDEEAFLEEKGYHQPKVLTKLPKYTLYECEKGRRRMLSSANEAQKGNQLVLSNHLVSLLYHAKNCEASDGKSLKYIEAHRETFSELLAQVSEFATKYTLADANLSKINNLFEQNKEGDIKAIAQSFVDLMAFNAMGAPASFKFFEATIDRKRYTNLKELLSSTIIYQSITGLYESRKRLDD

SEQ ID NO: 535 - protein, 1099 aa, Listeria monocytogenes
MKNPYTIGLDIGTNSVGWAVLTDQYDLVKRKMKVAGNSDKKQIKKNFWGVRLFDDGQTAVDRRMNRTARRRIERRRNRISYLQEIFAVEMANIDANFFCRLNDSFYVDSEKRNSRHPFFATIEEEVAYHKNYRTIYHLREELVNSSEKADLRLVYLALAHIIKYRGNFLIEGALDTKNTSVDEVYKQFIQTYNQVFMSNIEEGALAKVEENTEVASILAGKFTRREKFERILRLYPGEKSTGMFAQFISLIVGNKGNFQKVFNLVEKTDIECAKDSYEEDLEALLAIIGDEYAELFVAAKNTYNAVVLSSIITVTATETNAKLSASMIERFDAHEKELGELKAFIKLHLPKQYQEIFNNAEIDGYAGYIDGKTKQVDFYKYLKTTLENVEGADYFITKIEEENFLRKQRTFDNGVIPHQLHLEELEAILHQQAKYYPFLREGYDKIKSLVTFRIPYFVGPLANGQSEFAWLTRKDDGEIRPWNIEEKVDFGKSAVDFIEKMTNKDTYLPKENVLPKHSLCYQKYMVYNELTKIRYIDDQGKTNYFSGREKQQIFNDLFKQKRKVKKKDLELFLRNINHIESPTIEGLEDSFNASYATYHDLLKVGLKQEILDNPLNTEILEDIVKILTVFEDKRMIKEQLEQFSDVLDGVVLKKLERRHYTGWGRLSAKLLVGIRDKQSHLTILDYLMNDDGLNRNLMQLINDSNLSFKSIIEKEQVSTTDKDLQSIVADLAGSPAIKKGILQSLKIVDELVSIMGYPPQTIVVEMARENQTTGKGKNNSKPRYKSLEKAIKDFGSQILKEHPTDNQELKNNRLYLYYLQNGKDIYTGQELDIHNLSNYDIDHIVPQSFITDNSIDNLVLTSSAGNREKGGDVPPLEIVRKRKVFWEKLYQGNLMSKRKFDYLTKAERGGLTEADKARFIHRQLVETRQITKNVANILHQRFNKETDNHGNTMEQVRIVTLKSALVSQFRKQFQLYKVREVNDYHHAHDAYLNGVVANTLLKVYPQLEPEFVYGEYHQFDWFKANKATAKKQFYTNIMLFFAQKERIIDENGEILWDKKYLETIKKVLDYRQINIVKKTEIQKGEFSKATIKPKGIPAN

SEQ ID NO: 536 - protein, 1334 aa, Listeria monocytogenes
MKNPYTIGLDIGTNSVGWAVLTDQYDLVKRKMKVAGNSDKKQIKKNFWGVRLFDEGETAADRRMNRTARRRIERRRNRISYLQEIFALEMANIDANFFCRLNDSFYVDSEKRNSRHPFFATIEEEVAYHKNYRTIYHLREELVNSSEKADLRLVYLALAHIIKYRGNFLIEGALDTKNTSVDGVYKQFIQTYNQVFISNIEEGTLAKMEENTTVADILAGKFTRKEKLERILQLYPGEKSTGMFAQFISLIVGSKGNFQKVFDLVEKTDIECAKDSYEEDLEALLAIIGDEYAELFVAAKNTYNAVVLSSIITVTDTETNAKLSASMIERFDAHEKDLSELKAFIKLHLPKQYEEIFSNVAIDGYAGYIDGKTKQVDFYKYLKTLLENIEGADYFIAKIEEENFLRKQRTFDNGAIPHQLHLEELEAILHQQAKYYPFLKEAYDKIKSLVTFRIPYFVGPLANGQSDFAWLTRKADGEIRPWNIEEKVDFGKSAVDFIEKMTNKDTYLPKENVLPKHSLYYQKYMVYNELTKVRYIDDQGKTNYFSGQEKQQIFNDYFKQKRKVSKKDLEQFLRNMSHIESPTIEGLEDSFNSSYATYHDLLKVGIKQEVLENPLNTEMLEDIVKILTVFEDKRMIKEQLQQFSDVLDGAVLKKLERRHYTGWGRLSAKLLVGIRDKQSHLTILDYLMNDDGLNRNLMQLINDSNLSFKSIIEKEQVSTTDKDLQSIVADLAGSPAIKKGILQSLKIVDELVSIMGYPPQTIVVEMARENQTTVKGKNNSRPRYKSLEKAIKEFGSQILKEHPTDNQELRNNRLYLYYLQNGKDMYTGQELDIHNLSNYDIDHIVPQSFITDNSIDNLVLTSSAGNREKGDDVPPLEIVRKRKVFWEKLFQGNLMSKRKFDYLTKAERGGLTEADKATFIHRQLVETRQITKNVANILHQRFNNETDNHGNNMEQVRIVMLKSALVSQFRKQFQLYKVREVNDYHHAHDAYLNGVVANTLLKVYPQLEPEFVYGEYHQFDWFKANKATAKKQFYTNIMLFFAQKERIIDENGEILWDKKYLETIKKVLDYRQMNIVKKTEIQKGEFSKATIKPKGNSSKLIPRKENWDPMKYGGLDSPNMAYAVIIEHAKGKKKVVFEKKIIRITIMERKAFEKDEKSFLEKQGYRQPKVLTKLPKYTLYECENGRRRMLASANEAQKGNQQVLKGQLITLLHHAKNCEASDGKSLDYIESNREMFGELLAHVSEFAKRYTLADANLSKINQLFEQNKDNDIKVIAQSFVNLMAFNAMGAPASFKFFEATIERKRYTNLKELLSATIIYQSITGLYEARKRLDG

SEQ ID NO: 537 - protein, 1334 aa, Listeria monocytogenes
MKNPYTIGLDIGTNSVGWAVLTNQYDLVKRKMKVAGNSDKKQIKKNFWGVRLFDDGQTAVDRRMNRTARRRIERRRNRISYLQEIFAVEMANIDANFFCRLNDSFYVDSEKRNSRHPFFATIEEEVAYHKNYRTIYHLREELVNSSEKADLRLVYLALAHIIKYRGNFLIEGALDTKNTSVDGVYEQFIQTYNQVFMSNIEEGTLAKVEENIEVANILAGKFTRREKFERILQLYPGEKSTGMFAQFISLIVGSKGNFQKVFDLIEKTDIECAKDSYEEDLEALLAIIGDEYAELFVAAKNTYNAVVLSSIITVTATETNAKLSASMIERFDAHEKDLGELKAFIKLHLPKQYQEIFNNAAIDGYAGYIDGKTKQVDFYKYLKTILENIEGADYFIAKIEEENFLRKQRTFDNGAIPHQLHLEELEAIIHQQAKYYPFLREDYEKIKSLVTFRIPYFVGPLAKGQSEFAWLTRKADGEIRPWNIEEKVDFGKSAVDFIEKMTNKDTYLPKENVLPKHSLCYQKYMVYNELTKVRYIDDQGKTNYFSGQEKQQIFNDLFKQKRKVKKKDLELFLRNINHIESPTIEGLEDSFNASYATYHDLLKVGMKQEILDNPLNTEMLEDIVKILTVFEDKPMIKEQLQQFSDVLDGGVLKKLERRHYTGWGRLSAKLLVGIREKQSHLTILDYLMNDDGLNRNLMQLINDSNLSFKSIIEKEQVSTTDKDLQSIVADLAGSPAIKKGILQSLKIVDELVSIMGYPPQTIVVEMARENQTTGKGKNNSKPRYKSLEKAIKEFGSKILKEHPTDNQELKNNRLYLYYLQNGKDMYTGQELDIHNLSNYDIDHIVPQSFITDNSIDNLVLTSSAGNREKGGDVPPLEIVRKRKVFWEKLYQGNLMSKRKFDYLTKAERGGLTDADKARFIHRQLVETRQITKNVANILHQRFNNETDNHGNTMEQVRIVTLKSALVSQFRKQFQLYKVREVNDYHHAHDAYLNGVVANTLLKVYPQLEPEFVYGEYHQFDWFKANKATAKKQFYTNIMLFFGQKERIIDENGEILWDKKYLETIKKVLDYRQMNIVKKTEIQKGEFSKATIKPKGNSSKLIPRKENWDPMKYGGLDSPNMAYAVIIEHAKGKKKLIFEKKIIRITIMERKMFEKDEEAFLEEKGYRHPKVLTKLPKYTLYECEKGRRRMLASANEAQKGNQLVLSNHLVSLLYHAKNCEASDGKSLKYIEAHRETFSELLAQVSEFATRYTLADANLSKINNLFEQNKEGDIQAIAQSFVDLMAFNAMGAPASFKFFEATIDRKRYTNLKELLSSTIIYQSITGLYESRKRLDD

SEQ ID NO: 538 - protein, 874 aa, Listeria seeligeri; identical to SEQ ID NO: 180

SEQ ID NO: 539 - protein, 1087 aa, Listeriaceae bacterium
MKKLVLGLDIGVASVGWGIIDAENGDVVDTGVRLFSSRDASENESRRTSRQSRRLSRRKKHRRERIKQLLLAHDMDICDIVNENPYELRVKGLNEKLEVSEIYVALTHLAKRRGVSYLDDVVEEGGTIKSEHLNKNMEEIKSGKMPCEIQLERFEKYGQVRGMIEINQDTEESSFLVNIFRTSDYIKEAKTILATQQKFHKQITNEFIDEYIHIMASKRDYFIGPGNEKSRTDYGVYRTNGDTWDNLFEILIGKCSVFPEETRAARSSYVAQEFNLLNDLNNLKISNLESGKLSASQKHDIVEKVKNSKKFGTKDLLKYIASVCECKIEDIGGCRVDKNRKPIMHTFENYRKVHNALNEAGVDLRLSETDYDELMKIMTLNSETLEIKKQCKEKLPQLTEDYLNVCLVLNKKGAFSGWHALSLKAMKLMMPELYGTSKNQMQIIHTMQLGKAYLKPLNQQKYLNSEAILEEIYNPIAARSIRQTIKVTNAILKKYGHLDSVIIEMPRDYQTSEDERKMIEKMQKENEKEKKAALKRAREEYPFPDEAFRNHKELATKLRLWYQQDQFCVYSGRKISVVDLVRNPNQFEIDHIIPQSVSLDDSLNNKVLCFSEENQKKGQQTPFYYHKGKSGNWTYEQYKLFVEKLFDKKKISNKKRELLLFEEDINKWDVRRGFIARNLVDTRYASRVILNSYQQYFGNHEMGTKVKVVRGKFTSQLRKKWRIFKDRNESHSHHAIDALIVAATANLRLWKKNTLGVSDEGKVYDKETGEILPFEKLTESEYNEMMNKEPYLNFKTKLQNIETKVKYSYRVSKKVNRKISDATIYSTRERDGIDYIVGKIKNIYDVKTYKDQFLKRYKKNKEQFLMYQHDPQTFAILENIMATYQDAENPFLAYKKEYGVIRKYSKKGGGSPVTSLKFIDKVLGQKIDLTAKNQAALPKNKKVVLQSITPYRADVYYDEIDKRYHLIGVKYSLFSFSKQGYVINPIAYQKLLEKEQIHSEMKFCFSLYREDIIEFGEDPDSLTRYRFWSKNESGKNKIEVKPIEKPNFEKQTVLTITKKIKILNKYQTDVLGNSFKAQEEKDPRNIE

SEQ ID NO: 540 - protein, 1345 aa, Marinilabilia sp.
MKKILGLDLGTTSIGWAFIKEPEKDVVGSEIVDMGVRIVALSSDEENDFAKGNTISINADRTLKRGARRNLQRFKLRRDALLEIFKEMKLIPSNFKYAEDGPSSTFSTLKLRDKAAKEKIELDDLVKVLLQINKKRGYRSSRKAKSEEDDGSAIDSMGIAKELYENDLTPGQWVFEALQKGRKNVPDFYRSDLQEEFKKIVNYQSEFYPDVLNSSFVEDWMGKASTPTKQYFNKKGVHLAENKGKREERRLQEYNWRAVAVNSKIDLSEIALILSQINSQISNSSGYLGAISDRSKELYFKNQTVGQYLYQQIKINPHTRLKGQVFYRQDYLDEFEKIWSVQSGFHPQLNDALKKEIRDITIFFQRRLKSQKHLISNCEFEDYHKVVPKSHPIFQEFRIWQNLNNLTLIKKDNLNEKSELALEDKIALANELAFKREQSVKDALNILGLKSSEWEFNFTKIEGNRTNHAFFEAFAKIIEIEDGEPLDLGNLKADDILDQFSEAFLRIGIDPGLLQVNNDIEGPNYEKQPYIQFWHLLYSSEDDQKLKQNLIKKFGFKPDHAKILASISLQDDHASLSSRAIKKILPHLQSGLIYDKACTYAGYNHSSSFTKEENEKRELSSELDLLKKNSLRNPVVEKILNQMINVVNAILKDPNLGKPDEIRVEMARELKANAEQRKNMTSNIASATRDHEKYREILKKEFGLKRVTKNDLLRYKLWLETDGISLYTGKPIEASKLFSKEYDIEHIIPKTRLFDDSFSNKTICERQLNIDKANVTAFSFLQNKLSGDEFEQYQSRVKSLFGKLSKAKIQKLLMANDKIPEDFIARQLQETRYISKKAKEILFEITRRVSVTTGTITDKLREDWGLVEIMKELNWEKYDKLGLTYTIEGKHGERLNKIKDWSKRNDHRHHAMDALTVALTKPAYIQYLNNLNAKELNGKKSTEIFAIEQKYLKRENGKLCFIPPVENIRTEAKKHLSKVLISYKAKNKVVTINKNRTNKKAGFNEQIALTPRGQLHKETVYGKAFHYSTKFEKIGASFDVQKINAVAKKEEREALLKRLAENGDDPKKAFTGKNSLSKMPIYLDLKRNIKLPEKVKTVVLEQNYTIRKNIDPDLKLDKVIDVGVKRILENRLKEFGGNAKLALSNLDENPIWLNKEKGITIKRVKISGVSNVESLHVKKDHFGEPILDQVGNEIPVDFVSTGNNHHVAIYEDEKGNLQEEVVSFFEAVVRQNQGLPIINKNHSLGWKFLFTLKQNEYFVFPSDDFDPTDVDLMDEENYHLISPNLFRVQKFTTKDYFFRHHLETTVEDKSELKGVSFKRLGLPGLNCIKKIRINHLGKIIQVGEY

SEQ ID NO: 541 - protein, 1091 aa, Mobiluncus mulieris
MDSRKYRVGIDVGTNSVGFAAVEEDDSGSPTRFLNTMVVIHDSGVDSEQKKYAITRLASAGTARRTRRLYRTRRQRLRELDDFISNELGYPLVNLENFADPYEPWKVRADLATTKLPNDELPEAMSIALRHMARHRGWRSPYQRVEALHLHAEISKEFAALKERVVEKTGDVFSDDATPAEVLVDLMGRQKVRGADGVLSGKLRQSDNANELRKIASVQGIDDETLNRIIDRVFSSKSPKGKASERVGMDALPGQGSKPRALKAMPSFQKFRVVSVICNLRIKDSGGDARPLSMEEKEKLIDYLMSSTTDDHVTWTDVADLLHVKRSQLQGTAKEGFDGERPYTRPPVNSTWSKIKDSKIKSLVALWKTGDVDVQSAIVEALSNASVLEDSRPGADIVVAYLESLDDKELESLDKVGLPAGRASYSEDSLERLTERMLRDDCDLFEARKREFNVADDWKPPADPIYAPVGNPGVDRVLKIVNRLLMAAEREWGAPTQINIEHVRSGFSSELMQREFERENERRRAQNEEAVKAILTEKGGNSRVSKYDITRYYAVKRQHCQCLYCGTPITFSDCELDHIVPRKGVGSTNTRVNLAAACRSCNRDKSNLPFAVWAGKASNFDVSIDDAVSRVKQWQRSQNEGVREFRAFQNEVISRLLKTTEDPEIDSRSLESVAWMARELHHRVEYYFQSKGAQTQVSVYRGAVTAQARKSSGLEDKVKMIGGGGKTRLDRRHHAMDAATIALMTPGISTTLSEKNNLRDAQKFTGQSETWKDYCGRTETARKHFAVWKSNMERLTDLFNDKLENDAIPVVQPLRLRLSNSKAHDDGIGKLDSKKLGSVWSLADIDRAATPQIWTALTRCDDFDPTKGLPENANRVIRAQGVKYESEDNIPVFPSNVAAIAVRDGYAEIGSTIHHARIYRIDDGKKTFYSMIRVFAVDLLKHQAEDLFTVKLPPSAISIRTCEDSLRRALSNGTAEYLGWLVPGDEIIVDTSDKAFHTGQIGDLLRNFPVNSFRLTGFPSNSRLRLKPVLLAGEGLRDDAEDSIKKILLGQGWRPAINVLFSKGKPRIVRRNSLGIERPSSNNGLPFSWEA

SEQ ID NO: 542 - protein, 1233 aa, Mycoplasma canis
MEKKRKVTLGFDLGIASIGWAIVDSETNQVYKLGSRLFDAPDTNLERRTQRGTRRLLRRRKYRNQKFYNLVKRTEVFGLSSREAIENRFRELSIKYPNIIELKTKALSQEVCPDEIAWILHDYLKNRGYFYDEKETKEDFDQQTVESMPSYKLNEFYKKYGYFKGALSQPTESEMKDNKDLKEAFFFDFSNKEWLKEINYFFNVQKNILSETFIEEFKKIFSFTRDISKGPGSDNMPSPYGIFGEFGDNGQGGRYEHIWDKNIGKCSIFTNEQRAPKYLPSALIFNFLNELANIRLYSTDKKNIQPLWKLSSIDKLNILLNLFNLPISEKKKKLTNANINDIVKKESTKSIMLSVEDIDMIKDEWAGKEPNVYGVGLSGLNIEESAKENKFKFQDLKILNVLINLLDNVGIKFEFKDRNDIIKNLELLDNLYLFLIYQKESNNKDSSIDLFIAKNELLNIENLKLKLKEFLLGAGNEFENHNSKTHSLSKKAIDAILPKLLDNNEGWNLEAIKNYDEEIKSQIEDNSSLMAKQDKKYLNDNFLKDAILPPNVKVTFQQAILIFNKIIQKFSKDFEIDKVVIELAREMTQDQENDALKGIAKAQKSKKSLVEERLEANNIDKSVFNDKYEKLIYKIFLWISQDFKDPYTGAQISTNEIVNNKVEIDHIIPYSLCFDDSSANKVLVHKQSNQEKSNSLPYEYIKQGHSGWNWDEFTKYVKRVFVNNVDSILSKKERLKKSENLLTTSYDGYDKLGFLARNLNDTRYATILFRDQLNNYAEHHLIDNKKMFKVIAMNGAVTSFIRKNMSYDNKLRLKDRSDFSHHAYDAAIIALFSNKTKTLYNLIDPSLNGIISKRSEGYWVIEDRYTGEIKELKKEDWTSIKNNVQARKIAKEIEEYLIDLDDEVFFSRKTKRKTNRQLYNETIYGIAAKTDEDGITNYYKKEKFSILDDKDIYLRLLREREKFVINQSNPEVIDQIIEIIESYGKENNIPSRDEAINIKYTKNKINYNLYLKQYMRSLTKSLDQFSEEFINQMIANKTFVLYNPTKNTTRKIKFLRLVNDVKINDIRKNQVINKFNGKNNEPKAFYENINSLGAIVFKNSANNFKTLSINTQIAIFGDKNWDIEDFKTYNMEKIEKYKEIYGIDKTYNFHSFIFPGTILLDKQNKEFYYISSIQTVRDIIEIKFLNKIEFKDENKNPDTSKTPKRLMFGIKSIMNNYEQVDISPFGINKKIFE

SEQ ID NO: 543 - protein, 1233 aa, Mycoplasma canis
MEKKRKVTLGFDLGIASVGWAIVDSETNQVYKLGSRLFDAPDTNLERRTQRGTRRLLRRRKYRNQKFYNLVKRTEVFGLSSREAIENRFRELSIKYPNIIELKTKALSQEVCPDEIAWILHDYLKNRGYFYDEKETKEDFDQQTIESMPSYKLNEFYKKYGYFKGALSQPTESEMKDNKDLKEAFFFDFSNKEWLKEINYFFNVQKNILSETFIEEFKKIFSFTRDISKGPGSDNMPSPYGIFGEFGDNGQGGRYEHIWDKNIGKCSIFTNEQRAPKYLPSALIFNFLNELANIRLYSTDKKNIQPLWKLSSIDKLNILLNLFNLPISEKKKKLTSANINDIVKKESTKSIMLSVEDIDMIKDEWAGKEPNVYGVGLSGLNIEESAKENKFKFQDLKILNVLINLLDNVGIKFEFKDRNDIIKNLELLDNLYLFLIYQKESNNKDSSIDLFIAKNESLNIENLKLKLKEFLLGAGNEFENHNSKTHSLSKKAIDAILPKLLDNNEGWNLEAIKNYDEEIKSQIEDNSFLMAKQDKKYLNDNFLKDAILPPNVKVTFQQAILIFNKIIQKFSKDFEIDKVVIELAREMTQDQENDALKGIAKAQKSKKSLVEERLEANNIDKSVFNEKYEKLIYKIFLWISQDFKDPYTGAKISANEIVDNKVEIDHIIPYSLCFDDSSANKVLVHKQSNQEKSNSLPYEYIKQGHSGWNWDEFTKYVKRVFVNNVDSILSKKERLKKSENLLTTSYDGYDKLGFLARNLNDTRYATILFRDQLNNYAEHHLIDDKKMFKVIAMNGAVTSFIRKNMSYDNKLRLKNRNDFSHHAYDAAIIALFSNKTKTLYNLIDPSLNGIISKRSEGYWVIEDRYTGEIKELKKEDWTSIKNNVQARKIAKEIEEYLIDLDDEVFFSRKTKRKTNRQLYNETIYGIAAKTDEDGITNYYKKEKLSILDDKDIYLRLLREREKFVINQSNPEVIDQIIEIIESYGKENNIPSRDEAINIKYTKNKINYNLYLKQYMRSLTKSLDQFSEEFINQMIANKTFVLYNPTKNTTRKIKFLRLVNDVKINDIRKNQVINKFNGKNNEPKAFYENINSLGAIVFKNSANNFKTLSINTQIAIFGDKNWDIEDFKTYNMEKIEKYKEIYGIDKTYNFHSFIFPGTILLDKQNKEFYYISSIQTVRDIIEIKFLNKIEFKDENKNQDTSKTPKRLMFGIKSIMNNYEQVDISPFGINKKIFE

SEQ ID NO: 544 - protein, 1233 aa, Mycoplasma canis; identical to SEQ ID NO: 247

SEQ ID NO: 545 - protein, 1233 aa, Mycoplasma canis
MEKKRKVTLGFDLGIASVGWAIVDSETNQVYKLGSRLFDAPDTNLERRTQRGTRRLLRRRKYRNQKFYNLVKRTEVFGLSSREAIENRFRELSIKYPNIIELKTKALSQEVCPDEIAWILHDYLKNRGYFYDEKETKEDFDQQTVESMPSYKLNEFYKKYGYFKGALSQPTESEMKDNKDLKEAFFFDFSNKEWLKEINYFFNVQKNILSETFIEEFKKIFSFTRDISKGPGSDNMPSPYGIFGEFGDNGQGGRYEHIWDKNIGKCSIFTNEQRAPKYLPSALIFNFLNELANIRLYSTDKKNIQPLWKLSSVDKLNILLNLFNLPISEKKKKLTSTNINDIVKKESIKSIMISVEDIDMIKDEWAGKEPNVYGVGLSGLNIEENAKENKFKFQDLKILNVLINLLDNVGIKFEFKDRNDIIKNLELLDNLYLFLIYQKESNNKDSSIDLFIAKNKSLNIENLKLKLKEFLLGAGNEFENHNSKSHSLSKKAIDAILPKLLDNNEGWNLEAIKNYDEEIKSQIEDNSSLMAKQDKKYLNDNFLKDAILPPNVKVTFQQAILIFNKIIQKFSKDFEIDKVVIELAREMTQDQENDALKGMAKAQKSKKSLVEERLEANNIDKSVFNDKYEKLIYKIFLWISQDFKDPYTGAQISVNEIVNNKVEIDHIIPYSLCFDDSSANKVLVHKQSNQEKSNSLPYEYIKQGHSGWNWDEFTKYVKRVFVNNVDSILSKKERLKKSENLLTTSYDGYDKLGFLARNLNDTRYATILFRDQLNNYAEHHLIDNKKMFKVIAMNGAVTSFIRKNMSYDNKLRLKDRSDFSHHAYDAAIIALFSNKTKTLYNLIDPSLNGIISKRSEGYWVIEDRYTGEIKELKKEDWTSIKNNVQARKIAKEIEEYLIDLDDEVFFSRKTKRKTNRQLYNETIYGIAAKTDEDGITNYYKKEKFSILDDKDIYLRLLREREKFVINQSNPEVIDQIIEIIESYGKENNIPSRDEAINIKYTKNKINYNLYLKQYMRSLTKSLDKFSEEFINQMIANKTFVLYNPTKNTTRKIKFLRLVNDVKINDIRKNQVINKFNGKNNEPKAFYENINSLGAIVFKNSANNFKTLSINTQIAIFGDKNWDIEDFKTYNMEKIEKYKEIYGIDKTYNFHSFIFPGTILLDKQNKEFYYISSIQTVRDIIEIKFLNKIEFKDENKNQDTSKTPKRLMFGIKSIMNNYEQVDISPFGINKKIFE

SEQ ID NO: 546 - protein, 1233 aa, Mycoplasma canis
MEKKRKVTLGFDLGIASVGWAIVDSETNQVYKLGSRLFDAPDTNLERRTQRGTRRLLRRRKYRNQKFYNLVKRTEVFGLSSREAIENRFRELSIKYPNIIELKTKALSQEVCPDEIAWILHDYLKNRGYFYDEKETKEDFDQQTVESMPSYKLNEFYKKYGYFKGALSQPTESEMKDNKDLKEAFFFDFSNKEWLKEINYFFNVQKNILSETFIEEFKKIFSFTRDISKGPGSDNMPSPYGIFGEFGDNGQGGRYEHIWDKNIGKCSIFTNEQRAPKYLPSALIFNFLNELANIRLYSTDKKNIQPLWKLSSVDKLNILLNLFNLPISEKKKKLTSTNINDIVKKESIKSIMLSVEDIDMIKYEWAGKEPNVYGVGLSGLNIEESAKENKFKFQDLKILNVLINLLDNVGIKFEFKDRNDIIKNLELLDNLYLFLIYQKESNNKDSSIDLFIAKNKSLNIENLKLKLKEFLLGAGNEFENHNSKTHSLSKKAIDAILPKLLDNNEGWNLEAIKNYDEEIKSQIEDNSSLMAKQDKKYLNDNFLKDAILPPNVKVTFQQAILIFNKIIQKFSKDFEIDKVVIELAREMTQDQENDALKGIAKAQKSKKSLVEERLEANNIDKSVFDDKYEKLIYKIFLWISQDFKDPYTGAKISANEIVNNKVEIDHIIPYSLCFDDSSANKVLVHKQSNQEKSNSLPYEYIKQGHSGWNWDEFTKYVKRVFVNNVDSILSKKERLKKSENLLTTSYDGYDKLGFLARNLNDTRYATILFRDQLNNYAEHHLIDNKKMFKVIAMNGAVTSFIRKNMSYDNKLRLKDRSDFSHHAYDAAIIALFSNKTKTLYNLIDPSLNGIISKRSEGYWVIEDRYTGEIKELKKEDWTSIKNNVQARKIAKEIEEYLIDLDDEVFFSRKTKRKTNRQLYNETIYGIAAKTDEDGITNYYKKEKFSILDDKDIYLRLLREREKFVINQSNPEVIDQIIEIIESYGKENNIPSRDEAINIKYTKNKINYNLYLKQYMRSLTKSLDQFSEEFINQMIANKTFVLYNPTKNTTRKIKFLRLVNDVKINDIRKNQVINKFNGKNNEPKAFYENINSLGAIVFKNSANNFKTLSINTQIAIFGDKNWDIEDFKTYNMEKIEKYKEIYGIDKTYNFHSFIFPGTILLDKQNKEFYYISSIQTVRDIIEIKFLNKIEFKDENKNQDTSKTPKRLMFGIKSIMNNYEQVDISPFGINKKIFE

SEQ ID NO: 547 - protein, 1239 aa, Mycoplasma cynos
MEEKRKVTLGFDLGVASVGWAIVDSETNEVYKLGSRLFDIPDTNIDRRAKRGSRRLVRRRSYRNQKFYNLIKRTKTFGFLDKEAIEKEFVLLSIKYPNIIELKVKGLQEEVSKSEAVWILHDYLKNRGYFYDDKEEKDDLENPSIESMPSYKLYEFYKEYGYFKGALSSPTESEKNKDSDLEKAIFFNFSNKEWTKEINHFFKIQKNIFSEDFKAKFMEFFSFIRDISKGPGSENMPSQYSIFGKYGDDGMGGKYQHIWDKNIGKCSIFKDKVRAPKYLPSALFFNLLNELSNIRLYSVDKREKSVLWRLSSKDKINIILNILQIILFKNDGKISNLDINKIVKNESIKSIILNEIDLDLIKDMWFEKEPNVYGIGLSGLNIEENKKENRFKFQDLKIFSVFIDLLKKSNINIEFNNEKDIIHNLKLLDELYFFLITQKYSRDKYGSIKKFILNNKSFNIDNLDEKLNIFLSISDDEFDNHNSKTHSLSKEAIYFIFPKLLHNNEGWNLEAIKNYDIDVREEISKHSFGIKKQDKKYLDDAFLDDAILPPSVKVTIKQSILIFNKIIKKFSNKFQIDNVVIELAREMTQEKEMDAQKSLNRLKKSRKKIIEERLNANNIDSKMFRDKTGEISPNYIYKIYLWISQNFKDPYTGENISANDILKNNVEIDHIIPYSLCFDDSSSNKVLVFKHSNQSKGNFLPFDMISTFSENSVWNWKEYTQYVEKTFKTNLESILDKKERVKKADNLLTSSYDGYDKLGFLARNLNDTRYATILFRDQLINYSENHLIDSKKMFKVIAMNGGVTSFIRKNMSFDSGLKVKDRSIFSHHAYDAAIIALFSNKTKILYNLINPSLDGIISKRSEGYWVLEDRLTGEIRKLNYNDWQSIKNNVEVKKIAREIESHLSNLDNVVMFSRKSKRKTNKELYNETLYGIATRIDENGIKNYYKKEKFNILEDENIYLRLLNERENFIINRSNPEVIDAIIEIFETIDKNKIPARDVAKNIKYTDNKIKYNLYLKDYMRKLVDEFPDKFRKDFIEQMIAKKIFILFNPIKNTTRKIKSLRSINNNKIEDIRKKQVLEKFNTAKNEPRSFYESLNSLGAIIFKNNLNIYKKMSISSQIATFGDKNWKIDDINTYNKEKLNKYKEIYGIDETYDFYSFIFPGTILLDEKNKEFLYISSIQTLKDKIELKFLDRIEFEKKNVNSNLKPKIKREIISTKKLMSDYKIIKISPLGINKKIFE

SEQ ID NO: 548 - protein, 1269 aa, Mycoplasma gallisepticum
MNNSIKSKPEVTIGLDLGVGSVGWAIVDNETNIIHHLGSRLFSQAKTAEDRRSFRGARRLIRRRKYKLKRFINLIWKYNSYFGFKNKEDILNNYQEQQKLHNTVLNLKLEALNAKIDPKALSWILHDYLKNRGHFYEDNRDFNVYPTEELANYFGEYGYYKGIIDSKEDNDDKLEEGLTKYKFSNQHWLEEIKKVLSNQTGLPEKFKEEYESLFSYVRNYSEGPGSINSVSPYGIYHLDEKEGKVVQKYNNIWDKTIGKCSIFPDEYRAPKNSPIAMIFNEINELSTIRSYSIYLTGWFINQEFKKAYLNKLLDLLIKTNSEKPIDARQFKKLREETIAESIGKETLKDVEREEKLEKEDHKWKLKGLKLNTNGKIQYNDLSSLAKFVHKLKQHLKLDFLLEDQYTTLDKINFLQSLFVYLGKHLRYSNRVDSANLKEFSDSNKLFERVLQEQKDDLFKLFEQTDKDDEKILAQTHSLSTKAMLLAITRMTNLDNDEDNQKNNDKGWNFEAIKNFDQKFIDITKKNNNLSLKQDKRYLDDRFINDAILSPGVKRILREATKVFNAILKQFSEEYDVTKVVIELARELSEEKELENTKNYEKLIKKNSDKISERLEALDIAEDKIEDILKSPTKSYKVLLWLQQDHIDPYSQKEIAFEDILTKTEKTEIDHIIPYSISFDDSSSNKLLVLAESNQAKSNQTPYEFITSGNAGIKWEDYEAYCRKFKDGDTSLLDSTQRSKKFAKMMKTDTSSKYDIGFLARNLNDTRYATIVFRDALKDYANNHLVEDKPMFKVVCINGGVTSFLRKNFDKSWYAKKDRDKNIHHAVDASIISIFSNETKTLFNQLTQFADYKLFKNTDGSWKKIDPKTGVVTEVTDENWKQIRVRNQVSEIAKVINKCIQDSNIERKARYSRKIENKTNISLFNDTVYSAKKVGYEDQIKRKNLKTLDIHESAEENKNSKVKKQFVYRKLVNVSLLNNDKLADLFAEKEDILMYRANPWVINLAEQIFNEYTENKKIKSQNVFEKYMLDLTKEFPEKFSEAFVKSMLRNKTAIIYNVEKKVVHRIKRLKILSSELKENKLSNVIIRSKNESGTKLSYQDTINSIALMIMRSIDPTAKKQYIRVPLNTLNLHLGDQDFDLHNIDAYLKKPKFVKYLKANEIGDEYKPWRVLTSGTLLIHKKDKKLMYISSFQNLKDVIEIKNLIETEYKENDDSDPKKKKKANRFLMTLSTILNDYILLDAKDNFDILGLSKNRIDEILNSKLGLDKITK

SEQ ID NO: 549 - protein, 1224 aa, Mycoplasma gallisepticum
MNNSIKSKPEVTIGLDLGVGSVGWAIVDNETNIIHHLGSRLFSQAKTAEDRRSFRGARRLIRRRKYKLKRFINLIWKYNSYFGFKNKEDILNNYQEQQKLHNTVLNLKLEALNAKIDPKALSWILHDYLKNRGHFYEDNRDFNVYPTEELANYFGEYGYYKGIIDSKEDNDDKLEEGLTKYKFSNQHWLEEIKKVLSNQTGLPEKFKEEYESLFSYVRNYSEGPGSINSVSPYGIYHLDEKEGKVVQKYNNIWDKTIGKCSIFPDEYRAPKNSPIAMIFNEINELSTIRSYSIYLTGWFINQEFKKAYLNKLLDLLIKTNSEKPIDARQFKKLREETIAESIGKETLKDVEREEKLEKEDHKWKLKGLKLNTNGKIQYNDLSSLAKFVHKLKQHLKLDFLLEDQYTTLDKINFLQSLFVYLGKHLRYSNRVDSANLKEFSDSNKLFERVLQEQKDDLFKLFEQTDKDDEKILAQTHSLSTKAMLLAITRMTNLDNDEDNQKNNDKGWNFEAIKNFDQKFIDITKKNNNLSLKQDKRYLDDRFINDAILSPGVKRILREATKVFNAILKQFSEEYDVTKVVIELARELSEEKELENTKNYEKLIKKNSDKISERLEALDIAEDKIEDILKSPTKSYKVLLWLQQDHIDPYSQKEIAFEDILTKTEKTEIDHIIPYSISFDDSSSNKLLVLAESNQAKSNQTPYEFITSGNAGIKWEDYEAYCRKFKDGDTSLLDSTQRSKKFAKMMKTDTSSKYDIGFLARNLNDTRYATIVFRDALKDYANNHLVEDKPMFKVVCINGGVTSFLRKNFDKSWYAKKDRDKNIHHAVDASIISIFSNETKTLFNQLTQFADYKLFKNTDGSWKKIDPKTGVVTEVTDENWKQIRVRNQVSEIAKVINKCIQDSNIERKARYSRKIENKTNISLFNDTVYSAKKVGYEDQIKRKNLKTLDIHESAEENKNSKVKKQFVYRKLVNVSLLNNDKLADLFAEKEDILMYRANPWVINLAEQIFNEYTENKKIKSQNVFEKYMLDLTKEFPEKFSEAFVKSMLRNKTAIIYNVEKKVVHRIKRLKILSSELKENKLSNVIIRSKNESGTKLSYQDTINSIALMIMRSIDPTAKKQYIRVPLNTLNLHLGDQDFDLHNIDAYLKKPKFVKYLKANEIGDEYKPWRVLTSGTLLIHKKDKKLMYISSFQNLKDVIEIKNLIETEYKENDDSDPKKRRKQIGS

SEQ ID NO: 550 - protein, 1269 aa, Mycoplasma gallisepticum; identical to SEQ ID NO: 138

SEQ ID NO: 551 - protein, 226 aa, Mycoplasma iowae
MSNKKKITIGLDIGVSSVGWSILREDNVLIDYGSRLFPDAANAKDGKLENEARRSHRSMRRRIRRIKTRKNDLIKLLIKYNIISDQDELAKILEQGIVNETGNVPIVEIKYKGLKEKLSKEELLICLYHYIHKRGYFYITEEDLKENGENINRLPTEIQYDFYMKNGYYIGNEDNQKFSNLIWVKEIEKFLSKQSLDSNFVDEYISLFRRVRDYSDGPGSEKSPTP

SEQ ID NO: 552 - protein, 1304 aa, Mycoplasma synoviae
MLNNVQNLWKYLLLLIFDKKIIFLFKIKVILIRRYMENNNKEKIVIGFDLGVASVGWSIVNAETKEVIDLGVRLFSEPEKADYRRAKRTTRRLLRRKKFKREKFHKLILKNAEIFGLQSRNEILNVYKDQSSKYRNILKLKINALKEEIKPSELVWILRDYLQNRGYFYKNEKLTDEFVSNSFPSKKLHEHYEKYGFFRGSVKLDNKLDNKKDKAKEKDEEEESDAKKESEELIFSNKQWINEIVKVFENQSYLTESFKEEYLKLFNYVRPFNKGPGSKNSRTAYGVFSTDIDPETNKFKDYSNIWDKTIGKCSLFEEEIRAPKNLPSALIFNLQNEICTIKNEFTEFKNWWLNAEQKSEILKFVFTELFNWKDKKYSDKKFNKNLQDKIKKYLLNFALENFNLNEEILKNRDLENDTVLGLKGVKYYEKSNATADAALEFSSLKPLYVFIKFLKEKKLDLNYLLGLENTEILYFLDSIYLAISYSSDLKERNEWFKKLLKELYPKIKNNNLEIIENVEDIFEITDQEKFESFSKTHSLSREAFNHIIPLLLSNNEGKNYESLKHSNEELKKRTEKAELKAQQNQKYLKDNFLKEALVPLSVKTSVLQAIKIFNQIIKNFGKKYEISQVVIEMARELTKPNLEKLLNNATNSNIKILKEKLDQTEKFDDFTKKKFIDKIENSVVFRNKLFLWFEQDRKDPYTQLDIKINEIEDETEIDHVIPYSKSADDSWFNKLLVKKSTNQLKKNKTVWEYYQNESDPEAKWNKFVAWAKRIYLVQKSDKESKDNSEKNSIFKNKKPNLKFKNITKKLFDPYKDLGFLARNLNDTRYATKVFRDQLNNYSKHHSKDDENKLFKVVCMNGSITSFLRKSMWRKNEEQVYRFNFWKKDRDQFFHHAVDASIIAIFSLLTKTLYNKLRVYESYDVQRREDGVYLINKETGEVKKADKDYWKDQHNFLKIRENAIEIKNVLNNVDFQNQVRYSRKANTKLNTQLFNETLYGVKEFENNFYKLEKVNLFSRKDLRKFILEDLNEESEKNKKNENGSRKRILTEKYIVDEILQILENEEFKDSKSDINALNKYMDSLPSKFSEFFSQDFINKCKKENSLILTFDAIKHNDPKKVIKIKNLKFFREDATLKNKQAVHKDSKNQIKSFYESYKCVGFIWLKNKNDLEESIFVPINSRVIHFGDKDKDIFDFDSYNKEKLLNEINLKRPENKKFNSINEIEFVKFVKPGALLLNFENQQIYYISTLESSSLRAKIKLLNKMDKGKAVSMKKITNPDEYKIIEHVNPLGINLNWTKKLENNN

SEQ ID NO: 553 - protein, 1401 aa, Myroides injenensis
MKRILGLDLGTTSIGWAYVHEAENVNETSSIQKVGVRVNPLTTEEQTNFEKGKPITTNASRTLARSARRNLQRYKLRRDNLIQILKENNWINNTTSLTETGNHSTFETYELRNKAASEKLTLDQLSRVLLMLNKKRGYKSSRKVNSKEEGQLIDGMEVAKKLYHEQLTPGQLSLQLMNQGVKKLPDYYRSDLNQELESIWNFQQQFYPNILTDKFKEEINGKGLTSTSSAFWNIYNFNTAENKGSRDEKKKQALQWRSEALSKQLSKEIVAYIIADLNGQIYNSSGYLGAISDRSKELYFNNLTVGQYLFKQLKSNPHTSLKNQVFYRQDYLNEFEKIWETQSKFYPKELTAALKREIRDVIIFYQRKLKSQKGLISFCEFEQKQKTINGKTKTIGHRVIPKSSPLFQEFKIWQQLHNVVLRNKKTNEIVSLADEQKVHLFEELNLKGKLKSNQVLKLIENKPKDWELNYTELEGNNTNKALYNAYLDILDIEGYDVRNELKVKLNKDDIELSDLDVNASEIKEMIFSVFKHLGINTEILEFDATLEDKVFEKQASYQLWHLLYSYEEDNSPTGLDRLYNLLHKKFGFKLNHAKLIGNVLFQDDYGSLSSKAIKNIFPYITENNYYTACELAGYKHSKHSLTKEENETRELKNRLTILPKNSLRNPVVEKIINQMINVVNTLIDEENNILIAQGKEPNFQFDEIRIELARELKKNAKEREELTKSINKSKTDHEKIIKILQKEDGIKNPTRNDIVRFKLYSELKNNGYKDLYTNEYIERKDIFTKEYDIEHIIPQSKLFDDSFSNKTLVRRNVNLKKGNQTAYDFILCEYGQEKANEFETRITNLYNLGKDEGISKSKFKKLLMQESEIGNGFIERDLRETQYIAKKAKSLLLEITRNVISTSGSITDRLREDWGLINVMKELNLQKYRDAGLTEFVKMKDGNKKEVIIDWTKRNDHRHHAMDALTIAFTKHNHIQYLNHLNARKNVNNELHNNIIAIEKLETTLVSDERGNKKRIFKEPIANFRTIAKSHLEAILVSHKAKNKVVTKNINKISGKKISQQTLTPRGQLHKETIYGKIRQYVSKQEKVGPKFTIEVIEQVSNPTYRNLLLKRLEENNNDPKKAFGGKNSLNKNPIYINLEKNIKVPEVLKLVWLEDNYTIRKEISPDLKIDKVIDQGVKQILQNRLAQYKGDSKLAFSNLDANPIWLNEDKGIAIKRVTISGIATAQPLHRKKDHLGQPILDHNGQEIPVDFISTGNNHHVAIYEDENGKLQESVVSHFEAVERVNQKLPIIDKTFNQHLGWKFLFTMKQNELFLFPSDDFNPNEIDLFDKQNYTVISKHLFRIQKLSTKDYSFRHHLETNVEEIKDLKTITWRREGLNGIQNIIKVRTNHLGEIIHIGEY

SEQ ID NO: 554 - protein, 1466 aa, Myroides odoratus
MKNILGLDLGTNSIGWALVKEDFENKQGEILGLGSRIIPMSQDILGEFGRGNSISQTADRTGYRGVRRLRERHLLRRERLHRVLNILGFLPNHYAKEIDFTKRLGKFINHAEPKLSFDKEFIFKDSFNEMLKDFQQNQPGFIINKHGEEALVPYDWTIYYLRKKALTQKIDKEELAWILLNFNQKRGYYQLRGEEEEENTNKLVEFYSLKIIDVIADNEVNKKGEVWYSLHLENGWIYRRSSKISLVDWKDKVRDFIVTTDVNDDGSEKLDKDGVVKRSFRAPSADDWTLLKKKTEQDIDNSNKTVGAYIYENLLLNPKQKIKGKLVRTIERKFYKDELKQILEKQKEFHQELQNEQLLQDCVRELYKYNEQHQQMLESKDFVHLFLNDIIFYQRPLRSQKSLISNCTLEKRVSRDGVVFPIKVISKSNPYYQEFRLLQWLQNLAIYRKDDDVNVTQEFLNSIESWENLLQFLNAKKEIKQEQLIKFLLEQKGLKGNSLKTAILTYRWNYVTDKVYPMNETRSLIQDKLKKVENVATDFLSFDNEMALWHIIYSVNDKIEYEKALAKFASKHNLDEISFVESFKKFPPFKSDYGSFSEKAIKKLLPLMRFGSVWNKNNIVPSVLDRIDKILTGEYDEKIKIRVREKAEQFQLNQIEDFQNLPLWLAQYVVYDRHSEAEIAGKWNSVKDLENYLKEFKQHSLRNPIVEQIITETLRVVKDIWQQYGNGVQNFFDEIHIELGREMKNTADERKRITNSVTENENTNLRIKALLVELKEDTNIENVRPHSPMQQEILKIYEEGVLNAVENIDEDILKISKTAQPSKSELIRYKLWLEQKYQSPYTGEMIPLSRLFTSDYEIEHVIPQSRYFDDSLSNKVICEAAVNKRKDNQLGLEFIKNHHSEKIELGNGRTAQVLEVEAYESFVKKNYDKNRGKRNKLLLEDVPEKMIERQLNDTRYISKFVTHLLSNIVRKDEVNSKDDGINSKNIIPGNGKITSQLKQDWGLNDVWNELILPRFERMNNLTNSTDFTSTNTNGKIIPTVPLEYSKGFSKKRIDHRHHALDALVIALATRDHVNLLNNESALPKKDRTKEEQKSFRFDLQVNLRNKEKYFNVKEGREKEKFTTFKKPWNTLTQDTRDALENMVVSFKQNLRVINKATNYYESYTDENGNLRLDKYGNPKKELISQKGTNWAIRKSLHKETVSGQIHLDRVKVTKGKIVTATRKSLDSSFNEKSIESITDTGIQKILRNYLKAKDNKPDVAFSPEGIEELNKSISVYNEGKNHQPIIKVRIFEQGSKFPVGETGNKIAKFVEAAKGTNLFFGIYQDKTGKRSYDTIPLNLVIERLKQGLSPVPETNEKGHQLLFHLSPNDLVYVPTIDDNEQLDSNRVYKFTDSSDTTCNFIPSNISAIIFNINSKEQEKRGINYPIQNELGVGSPQSKNQKSFDGFMIKEVCIKLKVDRLGNISKT

SEQ ID NO: 555 - protein, 241 aa, Neisseria lactamica
MAAFKPNPMNYILGLDIGIASVGWAMVEIDKEENPIRLIDLGVRVFERAEMPKTGDSLAMARRLARSVRRLTRRRAHRLLRARRLLKREGVLQDADFDENGLVKSLPNTPWQLRAAALDRKLTCLEWSAVLLHLIKHRGYLSQRKNEGETADKELGALLKGVADNAHALQTGDFRTPAELALNKFEKESGHIRNQRGDYSHTFSRKDLQAELNLLFEKQKEFGNPHVSDGLKEGIETLLMA

SEQ ID NO: 556 - protein, 666 aa, Neisseria lactamica
MAAFKPNPMNYILGLDIGIASVGWAMVEVDEEENPIRLIDLGVRVFERAEVPKTGDSLAMARRLARSVRRLTRRRAHRLLRARRLLKREGVLQDADFDENGLVKSLPNTPWQLRAAALDRKLTCLEWSAVLLHLVKHRGYLSQRKNEGETADKELGALLKGVADNAHALQTGDFRTPAELALNKFEKESGHIRNQRGDYSHTFSRKDLQAELNLLFEKQKEFGNPHVSDGLKEDIETLLMAQRPALSGDAVQKMLGHCTFEPAEPKAAKNTYTAERFIWLTKLNNLRILEQGSERPLTDTERATLMDEPYRKSKLTYAQARKLLGLEDTAFFKGLRYGKDNAEASTLMEMKAYHAISRALEKEGLKDKKSPLNLSTELQDEIGTAFSLFKTDKDITGRLKDRVQPEILEALLKHISFDKFVQISLKALRRIVPLMEQGKRYDEACAEIYGDHYCKKNAEEKIYLPPIPADEIRNPVVLRALSQARKVINCVVRRYGSPARIHIETAREVGKSFKDRKEIEKRQEENRKDREKAAAKFREYFPNFVGEPKSKDILKLRLYEQQHGKCLYSGKEINLVRLNEKGYVEIDHALPFSRTWDDSFNNKVLVLGSENQNKGNQTPYEYFNGKDNSREWQEFKARVETSRFPRSKNNGFCCKNSMKKDLKNAT

SEQ ID NO: 557 - protein, 828 aa, Neisseria lactamica
MLGHCTFEPAEPKAAKNTYTAERFIWLTKLNNLRILEQGSERPLTDTERATLMDEPYRKSKLTYAQARKLLGLEDTAFFKGLRYGKDNAEASTLMEMKAYHAISRALEKEGLKDKKSPLNLSTELQDEIGTAFSLFKTDKDITGRLKDRVQPEILEALLKHISFDKFVQISLKALRRIVPLMEQGKRYDEACAEIYGDHYGKKNTEEKIYLPPIPADEIRNPVVLRALSQARKVINAVVRRYDSPARIHIETAREVGKSFKDRKEIEKRQEENRKDREKAAAKFREYFPNFVGEPKSKDILKLRLYEQQHGKCLYSGKEINLVRLNEKGYVEIDHALPFSRTWDDSFNNKVLVLGSENQNKGNQTPYEYFNGKDNSREWQEFKARVETSRFPRSKKQRILLQKFDEEGFKERNLNDTRYVNRFLCQFVADHILLTGKGKRRVFASNGQITNLLRGFWGLRKVRAENDRHHALDAVVVACSTVAMQQKITRFVRYKEMNAFDGKTIDKETGEVLHQKAHFPQPWEFFAQEVMIRVFGKPDGKPEFEEADTSEKLRTLLAEKLSSRPEAVHEYVTPLFVSRAPNRKMSGQGHMETVKSAKRLDEGISVLRVPLTQLKLKDLEKMVNREREPKLYDALKAQLETHKDDPAKAFAEPFYKYDKAGSRTQQVKAVRIEQVQKTGVWVRNHNGIADNATMVRVDVFEKGGKYYLVPIYSWQVAKGILPDRAVVAFKDEEDWTVMDDSFEFRFVLYANDLIKAELKKETFFGYFSGLDRSTGNISLRSHDLDKTKGKDGVYRIGIKTALSFQKHQIDELGKEIRPCRLKKRPPVR

SEQ ID NO: 558 - protein, 408 aa, Neisseria lactamica
MNDTRYVNRFLCQFVADHILLTGKGKRRVFASNGQITNLLRGFWGLRKVRTENDRHHALDAVVVACSTVAMQQKITRFVRYKEMNAFDGKTIDKETGEVLHQKAHFPQPWEFFAQEVMIRVFGKPDGKPEFEEADTPEKLRTLLAEKLSSRPEAVHEYVTPLFVSRAPNRKMSGQGHMETVKSAKRLDEGISVLRVPLTQLKLKGLEKMVNREREPKLYDALKAQLETHKDDPAKAFAEPFYKYDKAGSRTQQVKAVRIEQVQKTGVWVRNHNGIADNATMVRVDVFEKGGKYYLVPIYSWQVAKGILPDRAVVAFKDEEDWTVMDDSFEFRFVLYANDLIKLTAKKNEFLGYFVSLNRATGAIDIRTHDTDSTKGKNGIFQSVGVKTALSFQKTKSTNSAKKSDHAV

SEQ ID NO: 559 - protein, 1082 aa, Neisseria meningitidis
MAAFKPNPINYILGLDIGIASVGWAMVEIDEDENPICLIDLGVRVFERAEVPKTGDSLAAARRLARSVRRLTRRRAHRLLRARRLLKREGVLQAADFDENGLIKSLPNTPWQLRAAALDRKLTPLEWSAVLLHLIKHRGYLSQRKNEGETADKELGALLKGVADNAHALQTGDFRTPAELALNKFEKESGHIRNQRGDYSHTFSRKDLQAELILLFEKQKEFGNPHVSGGLKEGIETLLMTQRPALSGDAVQKMLGHCTFEPAEPKAAKNTYTAERFIWLTKLNNLRILEQGSERPLTDTERATLMDEPYRKSKLTYAQARKLLGLEDTAFFKGLRYGKDNAEASTLMEMKAYHAISRALEKEGLKDKKSPLNLSPELQDEIGTAFSLFKTDEDITGRLKDRVQPEILEALLKHISFDKFVQISLKALRRIVPLMEQGKRYDEACAEIYGDHYGKKNTEEKIYLPPIPADEIRNPVVLRALSQARKVINGVVRRYGSPARIHIETAREVGKSFKDRKEIEKRQEENRKDREKAAAKFREYFPNFVGEPKSKDILKLRLYEQQHGKCLYSGKEINLGRLNEKGYVEIDHALPFSRTWDDSFNNKVLVLGSENQNKGNQTPYEYFNGKDNSREWQEFKARVETSRFPRSKKQRILLQKFDEDGFKERNLNDTRYVNRFLCQFVADRMRLTGKGKKRVFASNGQITNLLRGFWGLRKVRAENDRHHALDAVVVACSTVAMQQKITRFVRYKEMNAFDGKTIDKETGEVLHQKTHFPQPWEFFAQEVMIRVFGKPDGKPEFEEADTPEKLRTLLAEKLSSRPEAVHEYVTPLFVSRAPNRKMSGQGHMETVKSAKRLDEGVSVLRVPLTQLKLKDLEKMVNREREPKLYEALKARLEAHKDDPAKAFAEPFYKYDKAGNRTQQVKAVRVEQVQKTGVWVRNHNGIADNATMVRVDVFEKGDKYYLVPIYSWQVAKGILPDRAVVQGKDEEDWQLIDDSFNFKFSLHPNDLVEVITKKARMFGYFASCHRGTGNINIRIHDLDHKIGKNGILEGIGVKTALSFQKYQIDELGKEIRPCRLKKRPPVR

SEQ ID NO: 560 - protein, 976 aa, Neisseria meningitidis
MAAFKPNPINYILGLDIGIASVGWAMVEIDEDENPICLIDLGVRVFERAEVPKTGDSLAAARRLARSVRRLTRRRAHRLLRARRLLKREGVLQAADFDENGLIKSLPNTPWQLRAAALDRKLTPLEWSAVLLHLIKHRGYLSQRKNEGETADKELGALLKGVADNAHALQTGDFRTPAELALNKFEKESGHIRNQRGDYSHTFSRKDLQAELILLFEKQKEFGNPHVSGGLKEGIETLLMTQRPALSGDAVQKMLGHCTFEPAEPKAAKNTYTAERFIWLTKLNNLRILEQGSERPLTDTERATLMDEPYRKSKLTYAQARKLLGLEDTAFFKGLRYGKDNAEASTLMEMKAYHAISRALEKEGLKDKKSPLNLSPELQDEIGTAFSLFKTDEDITGRLKDRIQPEILEALLKHISFDKFVQISLKALRRIVPLMEQGKRYDEACAEIYGDHYGKKNTEEKIYLPPIPADEIRNPVVLRALSQARKVINGVVRRYGSPARIHIETAREVGKSFKDRKEIEKRQEENRKDREKAAAKFREYFPNFVGEPKSKDILKLRLYEQQHGKCLYSGKEINLGRLNEKGYVEIDHALPFSRTWDDSFNNKVLVLGSENQNKGNQTPYEYFNGKDNSREWQEFKARVETSRFPRSKKQRILLQKFDEDGFKERNLNDTRYVNRFLCQFVADRMRLTGKGKKRVFASNGQITNLLRGFWGLRKVRAENDRHHALDAVVVACSTVAMQQKITRFVRYKEMNAFDGKTIDKETGEVLHQKTHFPQPWEFFAQEVMIRVFGKPDGKPEFEEADTPEKLRTLLAEKLSSRPEAVHEYVTPLFVSRAPNRKMSGQGHMETVKSAKRLDEGVSVLRVPLTQLKLKDLEKMVNREREPKLYEALKARLEAHKDDPAKAFAEPFYKYDKAGNRTQQVKAVRVEQVQKTGVWVRNHNGIADNATMVRVDVFEKGDKYYLVPIYSWQVAKGIFAG

SEQ ID NO: 561 - protein, 1081 aa, Neisseria meningitidis
MAAFKPNPINYILGLDIGIASVGWAMVEIDEDENPICLIDLGVRVFERAEVPKTGDSLAAARRLARSVRRLTRRRAHRLLRARRLLKREGVLQAADFDENGLIKSLPNTPWQLRSAALDRKLTPLEWSAVLLHLIKHRGYLSQRKNEGETADKELGALLKGVADNAHALQTGDFRTPAELALNKFEKESGHIRNRRGDYSHTFSRKDLQAELDLLFEKQKEFGNPHISDDLKEGIETLLMTQRPALSGDAVQKMLGHCTFEPTEPKAAKNTYTAERFVWLTKLNNLRILEQGSERPLTDTERATLMDEPYRKSKLTYAQARKLLELDDTAFFKGLRYGKDNAEASTLMEMKAYHAISRALEKEGLKDKKSPLNLSPELQDEIGTAFSLFKTDEDITGRLKDRVQPEILEVLLKHISFDKFVQISLKALRRIVPLMEQGKRYDEACAEIYGDHDGKKNTEEKIYLPPIPADEIRNPVVLRALSQARKVINAVVRRYGSPARIHIETAREVGKSFKDRKEIEKRQEENRKDREKAAAKFREYFPNFVGEPKSKDILKLRLYEQQHGKCLYSGKEINLGRLNEKGYVEIDHALPFSRTWDDSFNNKVLVLGSENQNKGNQTPYEYFNGKDNSREWQEFKARVETSRFPRSKKQRILLQKFDEEGFKERNLNDTRYVNRFLCQFVADHMLLTGKGKRRVFASNGQITNLLRGFWGLRKVRAENNRHHALDAVVVACSTVAMQQKITRFVRYKEMNAFDGKTIDKETGEVLHQKTHFPQPWEFFAQEVMIRVFGKPDGKPEFEEADTPEKLRTLLAEKLSSRPEAVHEYVTPLFVSRAPNRKMSGQGHMETVKSAKRLDEGVSVLRVPLTQLKLKDLEKMVNREREPKLYEALKARLEAHKDDPAKAFAEPFYKYDKAGNRTQQVKAVRVEQVQKTGVWVRNHNGIADNATMVRVDVFEKAGKYYLVPIYSWQVAKGILPDRAVVAYADEEGWTVIDESFRFKFVLYSNDLIKVQLKKDSFLGYFSGLDRATGAISLREHDLEKSKGKDGMHRIGVKTALSFQKYQIDEMGKEIRLCRLKKRPPVR

SEQ ID NO: 562 - protein, 1081 aa, Neisseria meningitidis
MAAFKPNPINYILGLDIGIASVGWAMVEIDEDENPICLIDLGVRVFERAEVPKTGDSLAAARRLARSVRRLTRRRAHRLLRARRLLKREGVLQAADFDENGLIKSLPNTPWQLRSAALDRKLTPLEWSAVLLHLIKHRGYLSQRKNEGETADKELGALLKGVANNAHALQTGDFRTPAELALNKFEKESGHIRNQRGDYSHTFSRKDLQAELILLFEKQKEFGNPHVSGGLKEGIETLLMTQRPALSGDAVQKMLGHCTFEPAEPKAAKNTYTAERFIWLTKLNNLRILEQGSERPLTDTERATLMDEPYRKSKLTYAQARKLLGLEDTAFFKGLRYGKDNAEASTLMEMKAYHAISRALEKEGLKDKKSPLNLSPELQDEIGTAFSLFKTDEDITGRLKDRIQPEILEALLKHISFDKFVQISLKALRRIVPLMEQGKRYDEACAEIYGDHYGKKNTEEKIYLPPIPADEIRNPVVLRALSQARKVINGVVRRYGSPARIHIETAREVGKSFKDRKEIEKRQEENRKDREKAAAKFREYFPNFVGEPKSKDILKLRLYEQQHGKCLYSGKEINLGRLNEKGYVEIDHALPFSRTWDDSFNNKVLVLGSENQNKGNQTPYEYFNGKDNSREWQEFKARVETSRFPRSKKQRILLQKFDEDGFKERNLNDTRYVNRFLCQFVADRMRLTGKGKKRVFASNGQITNLLRGFWGLRKVRAENDRHHALDAVVVACSTVAMQQKITRFVRYKEMNAFDGKTIDKETGEVLHQKTHFPQPWEFFAQEVMIRVFGKPDGKPEFEEADTPEKLRTLLAEKLSSRPEAVHEYVTPLFVSRAPNRKMSGQGHMETVKSAKRLDEGVSVLRVPLTQLKLKDLEKMVNREREPKLYEALKARLEAHKDDPAKAFAEPFYKYDKAGNRTQQVKAVRVEQVQKTGVWVRNHNGIADNATMVRVDVFEKAGKYYLVPIYSWQVAKGILPDRAVVAYADEEGWTVIDESFRFKFVLYSNDLIKVQLKKDSFLGYFSGLDRATGAISLREHDLEKSKGKDGMHRIGVKTALSFQKYQIDEMGKEIRLCRLKKRPPVR

SEQ ID NO: 563 - protein, 1082 aa, Neisseria meningitidis
MAAFKPNPINYILGLDIGIASVGWAMVEIDEDENPICLIDLGVRVFERAEVPKTGDSLAMARRLARSVRRLTRRRAHRLLRARRLLKREGVLQAADFDENGLIKSLPNTPWQLRAAALDRKLTPLEWSAVLLHLIKHRGYLSQRKNEGETADKELGALLKGVADNAHALQTGDFRTPAELALNKFEKESGHIRNQRGDYSHTFSRKDLQAELILLFEKQKEFGNPHVSGGLKEGIETLLMTQRPALSGDAVQKMLGHCTFEPAEPKAAKNTYTAERFIWLTKLNNLRILEQGSERPLTDTERATLMDEPYRKSKLTYAQARKLLGLEDTAFFKGLRYGKDNAEASTLMEMKAYHAISRALEKEGLKDKKSPLNLSPELQDEIGTAFSLFKTDEDITGRLKDRIQPEILEALLKHISFDKFVQISLKALRRIVPLMEQGKRYDEACAEIYGDHYGKKNTEEKIYLPPIPADEIRNPVVLRALSQARKVINGVVRRYGSPARIHIETAREVGKSFKDRKEIEKRQEENRKDREKAAAKFREYFPNFVGEPKSKDILKLRLYEQQHGKCLYSGKEINLGRLNEKGYVEIDHALPFSRTWDDSFNNKVLVLGSENQNKGNQTPYEYFNGKDNSREWQEFKARVETSRFPRSKKQRILLQKFDEDGFKERNLNDTRYVNRFLCQFVADRMRLTGKGKKRVFASNGQITNLLRGFWGLRKVRAENDRHHALDAVVVACSTVAMQQKITRFVRYKEMNAFDGKTIDKETGEVLHQKTHFPQPWEFFAQEVMIRVFGKPDGKPEFEEADTPEKLRTLLAEKLSSRPEAVHEYVTPLFVSRAPNRKMSGQGHMETVKSAKRLDEGVSVLRVPLTQLKLKDLEKMVNREREPKLYEALKARLEAHKDDPAKAFAEPFYKYDKAGNRTQQVKAVRVEQVQKTGVWVRNHNGIADNATMVRVDVFEKGDKYYLVPIYSWQVAKGILPDRAVVQGKDEEDWQLIDDSFNFKFSLHPNDLVEVITKKARMFGYFASCHRGTGNINIRIHDLDHKIGKNGILEGIGVKTALSFQKYQIDELGEEIRPCRLKKRPPVR

SEQ ID NO: 564 - protein, 1082 aa, Neisseria meningitidis
MAAFKPNPINYILGLDIGIASVGWAMVEIDEDENPICLIDLGVRVFERAEVPKTGDSLAMARRLARSVRRLTRRRAHRLLRARRLLKREGVLQAADFDENGLIKSLPNTPWQLRAAALDRKLTPLEWSAVLLHLIKHRGYLSQRKNEGETADKELGALLKGVADNAHALQTGDFRTPAELALNKFEKESGHIRNQRGDYSHTFSRKDLQAELILLFEKQKEFGNPHVSGGLKEGIETLLMTQRPALSSDAVQKMLGHCTFEPAEPKAAKNTYTAERFIWLTKLNNLRILEQGSERPLTDTERATLMDEPYRKSKLTYAQARKLLGLEDTAFFKGLRYGKDNAEASTLMEMKAYHAISRALEKEGLKDKKSPLNLSPELQDEIGTAFSLFKTDEDITGRLKDRIQPEILEALLKHISFDKFVQISLKALRRIVPLMEQGKRYDEACAEIYGDHYGKKNTEEKIYLPPIPADEIRNPVVLRALSQARKVINGVVRRYGSPARIHIETAREVGKSFKDRKEIEKRQEENRKDREKAAAKFREYFPNFVGEPKSKDILKLRLYEQQHGKCLYSGKEINLGRLNEKGYVEIDHALPFSRTWDDSFNNKVLVLGSENQNKGNQTPYEYFNGKDNSREWQEFKARVETSRFPRSKKQRILLQKFDEDGFKERNLNDTRYVNRFLCQFVADRMRLTGKGKKRVFASNGQITNLLRGFWGLRKVRAENDRHHALDAVVVACSTVAMQQKITRFVRYKEMNAFDGKTIDKETGEVLHQKTHFPQPWEFFAQEVMIRVFGKPDGKPEFEEADTPEKLRTLLAEKLSSRPEAVHEYVTPLFVSRAPNRKMSGQGHMETVKSAKRLDEGVSVLRVPLTQLKLKDLEKMVNREREPKLYEALKARLEAHKDDPAKAFAEPFYKYDKAGNRTQQVKAVRVEQVQKTGVWVRNHNGIADNATMVRVDVFEKGDKYYLVPIYSWQVAKGILPDRAVVQGKDEEDWQLIDDSFNFKFSLHPNDLVEVITKKARMFGYFASCHRGTGNINIRIHDLDHKIGKNGILEGIGVKTALSFQKYQIDELGKEIRPCRLKKRPPVR

SEQ ID NO: 565 - protein, 1082 aa, Neisseria meningitidis
MAAFKPNPINYILGLDIGIASVGWAMVEIDEDENPICLIDLGVRVFERAEVPKTGDSLAMARRLARSVRRLTRRRAHRLLRARRLLKREGVLQAADFDENGLIKSLPNTPWQLRAAALDRKLTPLEWSAVLLHLIKHRGYLSQRKNEGETADKELGALLKGVADNAHALQTGDFRTPAELALNKFEKESGHIRNQRGDYSHTFSRKDLQAELILLFEKQKEFGNPHVSGGLKEGIETLLMTQRPALSSDAVQKMLGHCTFEPAEPKAAKNTYTAERFIWLTKLNNLRILEQGSERPLTDTERATLMDEPYRKSKLTYAQARKLLGLEDTAFFKGLRYGKDNAEASTLMEMKAYHAISRALEKEGLKDKKSPLNLSPELQDEIGTAFSLFKTDEDITGRLKDRIQPEILEALLKHISFDKFVQISLKALRRIVPLMEQGKRYDEACAEIYGDHYGKKNTEEKIYLPPIPADEIRNPVVLRALSQARKVINGVVRRYGSPARIHIETAREVGKSFKDRKEIEKRQEENRKDREKAAAKFREYFPNFVGEPKSKDILKLRLYEQQHGKCLYSGKEINLGRLNEKGYVEIDHALPFSRTWDDSFNNKVLVLGSENQNKGNQTPYEYFNGKDNSREWQEFKARVETSRFPRSKKQRILLQKFDEDGFKERNLNDTRYVNRFLYQFVADRMRLTGKGKKRVFASNGQITNLLRGFWGLRKVRAENDRHHALDAVVVACSTVAMQQKITRFVRYKEMNAFDGKTIDKETGEVLHQKTHFPQPWEFFAQEVMIRVFGKPDGKPEFEEADTPEKLRTLLAEKLSSRPEAVHEYVTPLFVSRAPNRKMSGQGHMETVKSAKRLDEGVSVLRVPLTQLKLKDLEKMVNREREPKLYEALKARLEAHKDDPAKAFAEPFYKYDKAGNRTQQVKAVRVEQVQKTGVWVRNHNGIADNATMVRVDVFEKGDKYYLVPIYSWQVAKGILPDRAVVQGKDEEDWQLIDDSFNFKFSLHPNDLVEVITKKARMFGYFASCHRGTGNINIRIHDLDHKIGKNGILEGIGVKTALSFQKYQIDELGKEIRPCRLKKRPPVR

SEQ ID NO: 566 - protein, 1081 aa, Neisseria meningitidis
MAAFKPNPINYILGLDIGIASVGWAMVEIDEDENPICLIDLGVRVFERAEVPKTGDSLAMARRLARSVRRLTRRRAHRLLRARRLLKREGVLQAADFDENGLIKSLPNTPWQLRAAALDRKLTPLEWSAVLLHLIKHRGYLSQRKNEGETADKELGALLKGVADNAHALQTGDFRTPAKLALNKFEKESGHIRNQRGDYSHTFSRKDLQAELNLLFEKQKEFGNPHISDGLKEGIETLLMTQRPALSGDAVQKMLGHCTFEPTEPKAAKNTYTAERFVWLTKLNNLRILEQGSEQPLTDTQRAKLMDEPYRKSKLTYAQARKLLGLEDTAFFKGLRYGKDNAEASTLMEMKAYHAISRALEKEGLKDKKSPLNLSPELQDEIGTAFSLFKTDEDITGRLKDRVQPEILEALLKHISFDKFVQISLKALRRIVPLMEQGKRYNEACAEIYGDHYGKKNTEEKIYLPPIPADEIRNPVVLRALSQARKVINGVVRRYGSPARIHIETAREVGKSFKDRKEIEKRQEENRKDREKAAAKFQEYFPNFVGEPKSKDILKLRLYEQQHGKCLYSGKEINLGRLNEKGYVEIDHALPFSRTWDDSFNNKVLVLGSENQNKGNQTPYEYFNGKDNSREWQEFKARVETSRFPRSKKQRILLQKFDEDGFKERNLNDTRYVNRFLCQFVADRMRLTGKGKKRVFASNGQITNLLRGFWGLRKVRAENDRHHALDAVVVACSTVAMQQKITRFVRYKEMNAFDGKTIDKETGEVLHQKTHFPQPWEFFAQEVMIRVFGKPDGKPEFEEADTPEKLRTLLAEKLSSRPEAVHEYVTPLFVSRAPNRKMSGQGHMETVKSAKRLDEGVSVLRVPLTQLKLKDLEKMVNREREPKLYEALKARLEAHKDDPAKAFAEPFYKYDKAGNRTQQVKAVRVEQVQKTGVWVRNHNGIADNATMVRVDVFEKGDKYYLVPIYSWQVAKGILPDRAVVAYADEEDWTVIDESFRFKFVLYSNDLIKVQLKKDSFLGYFSGLDRATGAISLREHDLEKSKGKDGMHRIGVKTALSFQKYQIDEMGKEIRPCRLKKRPPVR

SEQ ID NO: 567 - protein, 1081 aa, Neisseria meningitidis
MAAFKPNPINYILGLDIGIASVGWAMVEIDEEENPIRLIDLGVRVFERAEVPKTGDSLAMARRLARSVRRLTRRRAHRLLRARRLLKREGVLQAADFDENGLIKSLPNTPWQLRAAALDRKLTPLEWSAVLLHLIKHRGYLSQRKNEGETADKELGALLKGVADNAHALQTGDFRTPAELALNKFEKECGHIRNQRGDYSHTFSRKDLQAELNLLFEKQKEFGNPHVSGGLKEGIETLLMTQRPALSGDAVQKMLGHCTFEPAEPKAAKNTYTAERFIWLTKLNNLRILEQGSERPLTDTERATLMDEPYRKSKLTYAQARKLLSLEDTAFFKGLRYGKDNAEASTLMEMKAYHTISRALEKEGLKDKKSPLNLSPELQDEIGTAFSLFKTDEDITGRLKDRIQPEILEALLKHISFDKFVQISLKALRRIVPLMEQGKRYDEACAEIYGDHYGKKNTEEKIYLPPIPADEIRNPVVLRALSQARKVINGVVRRYGSPARIHIETAREVGKSFKDRKEIEKRQEENRKDREKAAAKFREYFPNFVGEPKSKDILKLRLYEQQHGKCLYSGKEINLGRLNEKGYVEIDHALPFSRTWDDSFNNKVLVLGSENQNKGNQTPYEYFNGKDNSREWQEFKARVETSRFPRSKKQRILLQKFDEDGFKERNLNDTRYVNRFLCQFVADRMRLTGKGKKRVFASNGQITNLLRGFWGLRKVRAENDRHHALDAVVVACSTVAMQQKITRFVRYKEMNAFDGKTIDKETGEVLHQKTHFPQPWEFFAQEVMIRVFGKPDGKPEFEEADTPEKLRTLLAEKLSSRPEAVHEYVTPLFVSRAPNRKMSGQGHMETVKSAKRLDEGVSVLRVPLTQLKLKDLEKMVNREREPKLYEALKARLEAHKDDPAKAFAEPFYKYDKAGNRTQQVKAVRVEQVQKTGVWVRNHNGIADNATMVRVDVFEKGDKYYLVPIYSWQVAKGILPDRAVVAYADEEDWTVIDESFRFKFVLYSNDLIKVQLKKDSFLGYFSGLDRATGAISLREHDLEKSKGKDGMHRIGVKTALSFQKYQIDEMGKEIRPCRLKKRPPVR

SEQ ID NO: 568 - protein, 1082 aa, Neisseria meningitidis
MAAFKPNPINYILGLDIGIASVGWAMVEIDEEENPIRLIDLGVRVFERAEVPKTGDSLAMARRLARSVRRLTRRRAHRLLRARRLLKREGVLQAADFDENGLIKSLPNTPWQLRAAALDRKLTPLEWSAVLLHLIKHRGYLSQRKNEGETADKELGALLKGVADNAHALQTGDFRTPAELALNKFEKECGHIRNQRGDYSHTFSRKDLQAELNLLFEKQKEFGNPHVSGGLKEGIETLLMTQRPALSGDAVQKMLGHCTFEPAEPKAAKNTYTAERFIWLTKLNNLRILEQGSERPLTDTERATLMDEPYRKSKLTYAQARKLLGLEDTAFFKGLRYGKDNAEASTLMEMKAYHAISRALEKEGLKDKKSPLNLSPELQDEIGTAFSLFKTDEDITGRLKDRIQPEILEALLKHISFDKFVQISLKALRRIVPLMEQGKRYDEACAEIYGDHYGKKNTEEKIYLPPIPADEIRNPVVLRALSQARKVINGVVRRYGSPARIHIETAREVGKSFKDRKEIEKRQEENRKDREKAAAKFREYFPNFVGEPKSKDILKLRLYEQQHGKCLYSGKEINLVRLNEKGYVEIDHALPFSRTWDDSFNNKVLVLGSENQNKGNQTPYEYFNGKDNSREWQEFKARVETSRFPRSKKQRILLQKFDEEGFKERNLNDTRYVNRFLCQFVADHILLTGKGKRRVFASNGQITNLLRGFWGLRKVRAENDRHHALDAVVVACSTVAMQQKITRFVRYKEMNAFDGKTIDKETGEVLHQKTHFPQPWEFFAQEVMIRVFGKPDGKPEFEEADTPEKLRTLLAEKLSSRPEAVHEYVTPLFVSRAPNRKMSGQGHMETVKSAKRLDEGVSVLRVPLTQLKLKDLEKMVNREREPKLYEALKARLEAHKDDPAKAFAEPFYKYDKAGNRTQQVKAVRVEQVQKTGVWVRNHNGIADNATMVRVDVFEKGGKYYLVPIYSWQVAKGILPDRAVVQGKDEEDWQLIDDSFNFKFSLHPNDLVEVITKKARMFGYFASCHRGTGNINIRIHDLDHKIGKNGILEGIGVKTALSFQKYQIDELGKEIRPCRLKKRPPVR

SEQ ID NO: 569 - protein, 1081 aa, Neisseria meningitidis
MAAFKPNPINYILGLDIGIASVGWAMVEIDEEENPIRLIDLGVRVFERAEVPKTGDSLAMARRLARSVRRLTRRRAHRLLRARRLLKREGVLQAADFDENGLIKSLPNTPWQLRAAALDRKLTPLEWSAVLLHLIKHRGYLSQRKNEGETADKELGALLKGVADNAHALQTGDFRTPAELALNKFEKESGHIRNQRGDYSHTFSRKDLQAELILLFEKQKEFGNPHVSGGLKEGIETLLMTQRPALSGDAVQKMLGHCTFEPAEPKAAKNTYTAERFIWLTKLNNLRILEQGSERPLTDTERATLMDEPYRKSKLTYAQARKLLGLEDTAFFKGLRYGKDNAEASTLMEMKAYHAISRALEKEGLKDKKSPLNLSPELQDEIGTAFSLFKTDEDITGRLKDRVQPEILEALLKHISFDKFVQISLKALRRIVPLMEQGKRYDEACAEIYGDHYGKKNTEEEIYLPPITADEIRNPVVLRALSQARKVINAVVRRYGSPARIHIETAREVGKSFKDRKEIEKRQEENRKDREKAAAKFREYFPNFVGEPKSKDILKLRLYEQQHGKCLYSGKEINLVRLNEKGYVEIDHALPFSRTWDDSFNNKVLVLGSENQNKGNQTPYEYFNGKENSREWQEFKARVETSRFPRSKKQRILLQKFDEDGFKERNLNDTRYVNRFLCQFVADRMRLTGKGKKRVFASNGQITNLLRGFWGLHKVRAENDRHHALDAVVVACSTIAMQQKITRFVRYKEMNAFDGKTIDKETGEVLHQKAHFPQPWEFFAQEVMIRVFGKPDGKPEFEEADTPEKLRTLLAEKLSSRPEAVHEYVTPLFVSRAPNRKMSGQGHMETVKSAKRLDEGISVLRVPLTQLKLKDLEKMVNRAREPKLYEALKARLEAHKDDPAKAFAEPFYKYDKAGNRTQQVKAVRVEQVQKTGVWVRNHNGIADNATMVRVDVFEKAGKYYLVPIYSWQVAKGILPDRAVVAYADEEDWTVIDESFRFKFVLYSNDLIKVQLKKDSFLGYFSGLDRATGAISLREHDLEKSKGKDGMHRIGVKTALSFQKYQIDEMGKEIRPCRLKKRPPVR

SEQ ID NO: 570 - protein, 1082 aa, Neisseria meningitidis
MAAFKPNPINYILGLDIGIASVGWAMVEIDEEENPIRLIDLGVRVFERAEVPKTGDSLAMARRLARSVRRLTRRRAHRLLRARRLLKREGVLQAADFDENGLIKSLPNTPWQLRAAALDRKLTPLEWSAVLLHLIKHRGYLSQRKNEGETADKELGALLKGVANNAHALQTGDFRTPAELALNKFEKESGHIRNQRGDYSHTFSRKDLQAELILLFEKQKEFGNPHVSGGLKEGIETLLMTQRPALSGDAVQKMLGHCTFEPAEPKAAKNTYTAERFIWLTKLNNLRILEQGSERPLTDTERATLMDEPYRKSKLTYAQARKLLGLEDTAFFKGLRYGKDNAEASTLMEMKAYHAISRALEKEGLKDKKSPLNLSSELQDEIGTAFSLFKTDEDITGRLKDRVQPEILEALLKHISFDKFVQISLKALRRIVPLMEQGKRYDEACAEIYGDHYGKKNTEEKIYLPPIPADKIRNPVVLRALSQARKVINGVVRRYGSPARIHIETAREVGKSFKDRKEIEKRQEENRKDREKAAAKFREYFPNFVGEPKSKDILKLRLYEQQHGKCLYSGKEINLVRLNEKGYVEIDHALPFSRTWDDSFNNKVLVLGSENQNKGNQTPYEYFNGKDNSREWQEFKARVETSRFPRSKKQRILLQKFDEDGFKECNLNDTRYVNRFLCQFVADHILLTGKGKRRVFASNGQITNLLRGFWGLRKVRAENDRHHALDAVVVACSTVAMQQKITRFVRYKEMNAFDGKTIDKETGKVLHQKTHFPQPWEFFAQEVMIRVFGKPDGKPEFEEADTPEKLRTLLAEKLSSRPEAVHEYVTPLFVSRAPNRKMSGAHKDTLRSAKRFVKHNEKISVKRVWLTEIKLADLENMVNYKNGREIELYEALKARLEAYGGNAKQAFDPKDNPFYKKGGQLVKAVRVEKTQESGVLLNKKNAYTIADNGDMVRVDVFCKVDKKGKNQYFIVPIYAWQVAENILPDIDCKGYRIDDSYTFCFSLHKYDLIAFQKDEKSKVEFAYYINCDSSNGRFYLAWHDKGSKEQQFRISTQNLVLIQKYQVNELGKEIRPCRLKKRPPVR

SEQ ID NO: 571 - protein, 1082 aa, Neisseria meningitidis
MAAFKPNPINYILGLDIGIASVGWAMVEIDEEENPIRLIDLGVRVFERAEVPKTGDSLAMARRLARSVRRLTRRRAHRLLRARRLLKREGVLQAADFDENGLIKSLPNTPWQLRAAALDRKLTPLEWSAVLLHLIKHRGYLSQRKNEGETADKELGALLKGVANNAHALQTGDFRTPAELALNKFEKESGHIRNQRGDYSHTFSRKDLQAELILLFEKQKEFGNPHVSGGLKEGIETLLMTQRPALSGDAVQKMLGHCTFEPAEPKAAKNTYTAERFIWLTKLNNLRILEQGSERPLTDTERATLMDEPYRKSKLTYAQARKLLGLEDTAFFKGLRYGKDNAEASTLMEMKAYHAISRALEKEGLKDKKSPLNLSSELQDEIGTAFSLFKTDEDITGRLKDRVQPEILEALLKHISFDKFVQISLKALRRIVPLMEQGKRYDEACAEIYGDHYGKKNTEEKIYLPPIPADEIRNPVVLRALSQARKVINGVVRRYGSPARIHIETAREVGKSFKDRKEIEKRQEENRKDREKAAAKFREYFPNFVGEPKSKDILKLRLYEQQHGKCLYSGKEINLVRLNEKGYVEIDHALPFSRTWDDSFNNKVLVLGSENQNKGNQTPYEYFNGKDNSREWQEFKARVETSRFPRSKKQRILLQKFDEDGFKECNLNDTRYVNRFLCQFVADHILLTGKGKRRVFASNGQITNLLRGFWGLRKVRAENDRHHALDAVVVACSTVAMQQKITRFVRYKEMNAFDGKTIDKETGKVLHQKTHFPQPWEFFAQEVMIRVFGKPDGKPEFEEADTPEKLRTLLAEKLSSRPEAVHEYVTPLFVSRAPNRKMSGAHKDTLRSAKRFVKHNEKISVKRVWLTEIKLADLENMVNYKNGREIELYEALKARLEAYGGNAKQAFDPKDNPFYKKGGQLVKAVRVEKTQESGVLLNKKNAYTIADNGDMVRVDVFCKVDKKGKNQYFIVPIYAWQVAENILPDIDCKGYRIDDSYTFCFSLHKYDLIAFQKDEKSKVEFAYYINCDSSNGRFYLAWHDKGSKEQQFRISTQNLVLIQKYQVNELGKEIRPCRLKKRPPVR

SEQ ID NO: 572 - protein, 1082 aa, Neisseria meningitidis
MAAFKPNPINYILGLDIGIASVGWAMVEIDEEENPIRLIDLGVRVFERAEVPKTGDSLAMARRLARSVRRLTRRRAHRLLRTRRLLKREGVLQAANFDENGLIKSLPNTLWQLRAAALDRKLTPLEWSAVLLHLIKHRGYLSQRKNEGETADKELGALLKGVAGNAHALQTGDFRTPAELALNKFEKESGHIRNQRGDYSHTFSRKDLQAELNLLFEKQKEFGNPHISDGLKEGIETLLMTQRPALSGDAVQKMLGHCTFEPTEPKAAKNTYTTERFIWLTKLNNLRILEQGSERPLTDTERATLMDEPYRKSKLTYAQARKLLELDDIAFFKGLRYGKDNAEASTLMEMKAYHAISRALEKEGLKDKKSPLNLSPELQDEIGTAFSLFKTDEDITGRLKDRIQPEILEALLKHINFDKFVQISLKALRRIVPLMEQGKRYDEACAEIYGDHYGKKNTEEKIDLPPIPADEIHNPVVLRALSQARKVINGVVRRYGSPARIHIETAREVGKSFKDRKEIEKRQEENRKDREKAAAKFREYFPNFVGEPKSKDILKLRLYEQQHGKCLYSGKEINLGRLNEKGYVEIDHALPFSRTWDDSFNNKVLVLGSENQNKGNQTPYEYFNGKDNSREWQEFKARVETSRFPRSKKQRILLQKFDEDGFKERNLNDTRYVNRFLCQFVADRMRLTGKGKKRVFASNGQITNLLRGFWGLRKVRAENDRHHALDAVVVACSTVAMQQKITRFVRYKEMNAFDGKTIDKETGEVLHQKTHFPQPWEFFAQEVMIRVFGKPDGKPEFEEADTPEKLRTLLTEKLSSRPEAVHEYVTPLFVSRAPNRKMSGQGHMETVKSAKRLDEGISVLRVPLTQLKLKDLEKMVNREREPKLYEALKARLEAHKDDPAKAFAEPFYKYDKAGNRTQQVKAMRVEQVQKTGVWVRNHNGIADNATMVRVDVFEKGDKYYLVPIYSWQVAKGILPDRAVVQGKDEEDWQLIDDSFNFKFSLHPNDLVEVITKKARMFGYFASCHRGTGNINIRIHDLDHKIGKNGILEGIGVKTALSFQKYQIDELGKEIRPCRLKKRPPVR

SEQ ID NO: 573 - protein, 1082 aa, Neisseria meningitidis
MAAFKPNPINYILGLDIGIASVGWAMVEIDEEENPIRLIDLSVRVFERAEVPKTGDSLAMARRLARSVRRLTRRRAHRLLRARRLLKREGVLQAADFDENGLIKSLPNTPWQLRAAALDRKLTPLEWSAVLLHLIKHRGYLSQRKNEGETADKELGALLKGVADNAHALQTGDFRTPAELALNKFEKESGHIRNQRGDYSHTFSRKDLQAELILLFEKQKEFGNPHVSGGLKEGIETLLMTQRPALSGDAVQKMLGHCTFEPAEPKAAKNTYTAERFVWLTKLNNLRILEQGSERPLTDTERATLMDEPYRKSKLTYAQARKLLGLEDTAFFKGLRYGKDNAEASTLMEMKAYHAISRALEKEGLKDKKSPLRLSPELQDEIGTAFSLFKTDEDITGRLKDRVQPEILEALLKHISFDKFVQISLKALRRIVPLMEQGKRYDEACAEIYGDHYGKKNAEEKIYLPPIPADEIRNPVVLRALSQARKVINGVVRRYGSPARIHIETAREVGKSFKDRKEIEKRQEENRKDREKAAAKFREYFPNFVGEPKSKDILKLRLYEQQHGKCLYSGKEINLGRLNEKGYVEIDHALPFSRTWDDSFNNKVLVLGSENQNKGNQTPYEYFNGKDNSREWQEFKARVETSRFPRSKKQRILLQKFDEDGFKERNLNDTRYVNRFLCQFVADRMRLTGKGKKRVFASNGQITNLLRGFWGLRKVRAENDRHHALDAVVVACSTVAMQQKITRFVRYKEMNAFDGKTIDKETGEVLHQKTHFPQPWEFFAQEVMIRVFGKPDGKPEFEEADTPEKLRTLLAEKLSSRPEAVHEYVTPLFVSRAPNRKMSGQGHMETVKSAKRLDEGVSVLRVPLTQLKLKDLEKMVNREREPKLYEALKARLEAHKDDPAKAFAEPFYKYDKAGNRTQQVKAVRVEQVQKTGVWVRNHNGIADNATMVRVDVFEKGDKYYLVPIYSWQVAKGILPDRAVVQGKDEEDWQLIDDSFNFKFSLHPNDLVEVITKKARMFGYFASCHRGTGNINIRIHDLDHKIGKNGILEGIGVKTALSFQKYQIDELGKEIRPCRLKKRPPVR

SEQ ID NO: 574 - protein, 1082 aa, Neisseria meningitidis
MAAFKPNSINYILGLDIGIASVGWAMVEIDEEENPIRLIDLGVRVFERAEVPKTGDSLAMARRLARSVRRLTRRRAHRLLRTRRLLKREGVLQAANFDENGLIKSLPNTPWQLRAAALDRKLTPLEWSAVLLHLIKHRGYLSQRKNEGETADKELGALLKGVAGNAHALQTGDFRTPAELALNKFEKESGHIRNQRSDYSHTFSRKDLQAELILLFEKQKEFGNPHVSGGLKEGIETLLMTQRPALSGDAVQKMLGHCTFEPAEPKAAKNTYTAERFIWLTKLNNLRILEQGSERPLTDTERATLMDEPYRKSKLTYAQARKLLGLEDTAFFKGLRYGKDNAEASTLMEMKAYHAISRALEKEGLKDKKSPLNLSPELQDEIGTAFSLFKTDEDITGRLKDRIQPEILEALLKHISFDKFVQISLKALRRIVPLMEQGKRYDEACAEIYGDHYGKKNTEEKIYLPPIPADEIRNPVVLRALSQARKVINGVVRRYGSPARIHIETAREVGKSFKDRKEIEKRQEENRKDREKAAAKFREYFPNFVGEPKSKDILKLRLYEQQHGKCLYSGKEINLGRLNEKGYVEIDHALPFSRTWDDSFNNKVLVLGSENQNKGNQTPYEYFNGKDNSREWQEFKARVETSRFPRSKKQRILLQKFDEDGFKERNLNDTRYVNRFLCQFVADRMRLTGKGKKRVFASNGQITNLLRGFWGLRKVRAENDRHHALDAVVVACSTVAMQQKITRFVRYKEMNAFDGKTIDKETGEVLHQKTHFPQPWEFFAQEVMIRVFGKPDGKPEFEEADTLEKLRTLLAEKLSSRPEAVHEYVTPLFVSRAPNRKMSGQGHMETVKSAKRLDEGVSVLRVPLTQLKLKDLEKMVNREREPKLYEALKARLEAHKDDPAKAFAEPFYKYDKAGNRTQQVKAVRVEQVQKTGVWVRNHNGIADNATMVRVDVFEKGDKYYLVPIYSWQVAKGILPDRAVVQGKDEEDWQLIDDSFNFKFSLHPNDLVEVITKKARMFGYFASCHRGTGNINIRIHDLDHKIGKNGILEGIGVKTALSFQKYQIDELGKEIRPCRLKKRPPVR

SEQ ID NO: 575 - protein, 67 aa, Neisseria meningitidis
MFGYFASCHRGTGNINIRIHDLDHKIGKNGILEGIGVKTALSFQKYQIDELGKEIRPCRLKKRPPVR

SEQ ID NO: 576 - protein, 220 aa, Neisseria mucosa
MRHIFSDGLKEGIETLLMTQRPALSGDAVQKMLGHCTFEPTEPKAAKNTYTAERFIWLTKLNNLRILEQGSERPLTNTERATLMDEPYRKSKLTYAQARKLLGLKDTAFFKGLRYGKDNAEASTLMEMKAYHAISRALEKEGLKDKKSPLNLSPELQDEIGTAFSLFKTDEDITGRLKTELTPASNKTLSRPFTVKSASNGSTSAPWLPSTKWFLHFKPA

SEQ ID NO: 577 - protein, 392 aa, Neisseria sp.
MAPFTLKPLNYILGLDIGIASVGWAVVETDSDVLPYRLIDVGVRTFDRAEVPKTGESPAAARRLARSVRRMIRRRAHRMLRARRLLKREGMLQAADFDAHGLVENLPVNPWQLRVDALSRKLMPLEWAAVLLHMVKHRGYLSQRKNERNSSDKELGALLSGVAANSEALQGGDFRTPAELAVNKFEKESGHIRNQRGDYSHTFNRKDVQAELVLLFEKQKEYGNPYISDGLLTGVEDLLMTQRAALSGDAVQKMLGRCTFEPEEYKAAKNTYSAERFVWLTKLNNLRILDQGSERPLTDSERAKLMDEPYKKTKLTYAQVRRLLELDDTAFFKGLRYSKDNAESATLMEMKAYHSISGALEKAGLKNKKIAAGLIARIAGRNRRGVFAIQNR

SEQ ID NO: 578 - protein, 701 aa, Neisseria sp.
MQDEIGEAFSLFKTDEDIRGRLKGKLPDEQLDALLEYVSFDKFVQLSLKALRKILPLMEQGKRYDEACAEIYGDHYGIKDDKQAQFLPPVSADEIRNPVVLRALSQARKVVNAVVRRYGSPARVHIETAREVGKSFLDRKKIEKRQEENRKDRERSIAKFREYFPNFVGEPKAKDILKMRLYEQQQGQCLYSGKAIDLRRLNEKGYVEIDHALPFSRTWDDSFNNKVLVLAGENQNKRNQTPFEWLGGDEKRWREFTARVEHCRFPRSKKQRILMQKLDEKDFKERNLNDTRYVNRFLCNFIAQNMLLTGEDKNRVFASNGQITNLLRGMWGLKKVRESNDRHHALDAVVVACSTVAMQQKITNYVRQKEMNVFDGEMVDKTTGEVSRLHFPQPWDFFRQEVMMRVFGKPDTPSENNEEADTPEKLRALLADKLSSRPEAVHEAVTPLFVSRAPSRKMSGQGHMETIKSAKRLSEGKSVLRVPLTQLTPKLLENMVNREREPQLYEDLLGRLNAHGGDPAKAFAAPFFKRDKAGNPTQQVKAVRVEDVQKSGVIVREGNGVADNATMVRVDVFEKGGKYYLMPIYTWQAAKGILPNKAVIAHTDEANWQEMDTSFTFKFALYPNDLVLASLKKETYFGYFAGLDRSTGNISLRVHDLEKSKGKDGVYRIGVKTALSFQKYQVDELGKTIRPCRLKKRPPVR

SEQ ID NO: 579 - protein, 1089 aa, Neisseria sp.
MTAFKPNPLNYILGLDIGIASVGWAMVEIDDKENPVRLIDLGVRVFERAEMPKTGDSLAAARRLARSVRRLTRRRAHRLLRARRLLKHEGVLKPEDFDENGLVKPLPYIPKQPRNTPWQLRAAALDRKLTPLEWAAVLLHLVKHRGYLSQRKNEGETDDKELGALLKGVADNTHALQAGNFRTPAELALNKFEKESGHIRNQRGDYSHTFSRKDLQAELVLLFEKQKEFGNPYVSDDLKNGIENLLMTQRPALSGDAIQKMLGHCTFEPAEPKAAKNTYTAERFIWLTKLNNLRILNQGNERPLTDAERTTLMDEPYKKSKLTYAQARKLLDLDDTAFFKGLRYGKDNAESATLMEMKAYHAISRALEKEGLKDKKSPLSLSPELQDEIGTAFSLFKTDEEITGRLKGCLQPEILDALLKHISFDKFVQISLKALRRIVPLMEQGKRYDEACAEIYGDHHGRRNSEETLYLPPIPADEIRNPVVLRALSQARKVINGVGRRYGSPARIHIETAREVGKSFKDRKEIEKRQEENRKDREKAAAEFQEYFPNFVGEPKSKDILKLRLYRQQNCKCLYSGKEINLGRLNEKGYVEIDHALPFSRTWDDSFNNKVLVLGSENQNKGNRTPYEYLNGKDNSREWQEFKARVETSRFPHSKKQRILLQKFDEEGFKERNLNDTRYVNRFLCKFVADHMQLTGKGKRRVFASNGQITNLLRGFWGLRKVRAENDRHHALDAVVVACSTVAMQQRITRFVRYKEMNAFDGKTVDKETGEVLHQKTHFPQPWEFFAQEVMIRVFGKPDGKPELEEADTPEKLRALLAEKLSSRPEAVHEYVAPLFVSRAPNRKMSGQGHMETIKSPKRLDEGISVVRVPLTQLKLKDLEKMVNREREPKLYEALKARLEAHKDDPAKAFAEPFYKQDKAGNRTQQVKAVRIEQVQKTGVWVRNQNGIADNATMVRVDVFEKGGKYYLVPIYSWQVAKGILPDKAIIAFKDEEEWQLIDDSFNFKFPLHPNDLVEVITKKARIFGYFASCHRGTGNINIRIHDLDNKVGKNGILEGIGVKTALSFQKYQIDELGKEIRPCRLKKRPPVR

SEQ ID NO: 580 - protein, 1097 aa, Neisseria wadsworthii
MKKQPQRYILGLDLGIASVGWALILVDGAENPVGLLDCGVRTFERAEVPKTGDSLALARRQARSVRRLIRRRAHRLLRLRRLLKREGILSAADFNSDGLPNLPIDAWQLRVAGLERKLTNQEWAAVLLHLVKHRGYLSQRKSETQTENKELGRLLAGVAENSKLLSESSEQYRTPAELAVKLFAEQSGHLRNKGGEYTHTFNRLDLQKELHLLFERQYALGNPFASAELQSKVDELLMTQRSALQGEAVLKMLGKCTFEPSEYKAAKNTYSAERFIWLTKLNNLRILYNGEERALDEGDRKKLLDEPYKKAKLTYKQVRSILNLPESAVFKGLRYGKDSDGLKAENGTLMEMKAYHKIRTILDKAGLKGEWENRIRNPEILDKIGTAFSLYKTDEDIQAALADLRLPENVLDALLAGLNFDKFIQLSLKALRNILPLMERGIRYDEACKEVYGDHRALAESKNQVLLPPIPADEIRNPVVLRTLTQARKVINAIIRRYGSPQRVHIETARELGKSKQERDKIDRKNKENQNDRNRLASDIRKHFNFEPTPKDILKLRLYEQQHGKCLYSDLREEKGECLYTGNVIELHRLFEDGYVEIDHALPLSRTWDNSLNNKVLVLKSSNQNKGNKTPYEWLDGANNSRRWREFQARVQGCHFPYVKKQRIQTAKLDSKAEQGFLERNLNDTRYISKFMCQFITANLRLAETSNALMEEVAGENPYWKERKRQRVFAPSGSIIALLRGLWGLKKVREDNDRHHALDAIVVACSTVSMQQKITKAMQRRETLETVDSETGEVKTRIPQPWDFFRQEVMIRVFSDSPREELAEKLNSRPEALHDFVSPLFVSRAPNRKMTGQGHLETVKSAKRLSENISVVRKPLTALKLKDIENIVGYPDREPALYQALRERLLAHKDDPVKAFADKPFYKPAKDGGQGSLVKAVRIIENTKHGLKIRNGITDTNGDMVRTDVYQKTDKKGKRQYFIVPVYAWQVEKNELPTVDCKGYEIDDNYEFCFSLYKYDLIEIQNPNDINQELRAYYINCDSSDGRFWLAYHDKSAKEQQFRISTQNQPIIKKYQVDTLGKEIRLCKAEKRTALNGKKKK

SEQ ID NO: 581 - protein, 1426 aa, Niabella soli
MPRKNILGLDLGTTSIGFAKIIEDDDYQCSSVELIGVRVNPLTTDEQTNFEKGKPVSVNADRTLKRGMRRNLDRYQLRRDYLIEILRTHHIITADTKLAEDGKNTTHTTYALRALAATAEIPLEAFVRVLLAINKKRGYKSSRKAKNEDEGQLIDGMAIARRLYEESLTPGQFSYQLLKEGKKYLPDFYRSDLNTELNKVWNFQKQFYPEILTDEFKRHLEGKGQRATAVAFWGQHGFSMAENKGSREEKKLHAYKWRSEAAHKQLTKEEVAFVITEINNDLNKSSGYLGAISDRSKELFFNKQTVGQYLHQQLKENPHTRLKGQVFYRQDYLDEFETIWEMQAKFYSALTLELKEEVRDVVIFYQRKLKSQMGLISLCEFESKEIEIEKNGEKAKKRIGLRVAPKSSPLFQEFKIWQVLNNLEFRNKKTKEVFVPEMAAKQQLFDELNIKGNLLASEAIKILGYKTKDWEANYHTLEGNRTNKSLYDAWLKILELEGYDENLLKLSGSDDIDVSKIEKPALEIRQMVLAVFEVLGISGAILDFDAEADGKAFEQQPAYQLWHLLYSAEDDGKKYSQEDIFTYGHDNIGLKKKLCEKFGFRPEHTKILVNVVFSDDYGNLSSKAMRRIYPFIKELTYDKACAEAGYRHSAASLTKEEIAARPLQNRLDLLKKNELRSPVVEKILNQMVNVVNTLVDDENQNRKARGLSEDFHFDEIRIELARELKKNAKERAEMTTNINTAKQSHEKIIRILQTEFGVPNPSRNDIVRYKLYEELKNNGYKDLYTNTYISRDILFSKQIDVDHIIPQMSLFDDSFSNKTVVFRKDNQDKGNKTAYDYILGKYGEQALEEYISRITSLFELGKKNKEEGIGKAKFQKLQKRLVDIGDGFIERDLRESQYIAKKANNMLYAICRSVVSTSGEITARLREDWDLVNVMQEINLPKFRALGLTEMVEKKDGAQKERITDWTKRNDHRHHAMDALAIAFTRHSHIQYLNHLNARKDEANKWHPVVSKIEEKETVLIYDDLGNRKRKFKAPMPNFREVVKEHLENVLISHKAKNKVVTKNKNKIKTVRGEKVKTELTPRGQLHKETIYGRYRYYESKEEKIGPKFDAEMIGMVTNPQYKKLLLERLAANGNDPKKAFWGKNALNKNPLYVDEARQELLPEKILLRWLNDDYSIRKDVTPENLKDIKTIEKILDKGVKKILLKRLADFGNDPKKAFSDLDKNPIWQNEAKRIAIKRVTISGIKNAAPLHHKKDHLGNDILDEKGKQIPSSFVSTGNNHHVAIYRDAEGNLQERVVSLFDAVQLVNGGEPVIDKEYNKGIGWQFLFTMKQNEMFVFPDEKTGFNPREVDLLSSGNRKLISPNLFRVQKLASKNYFFRHHLETSVEEKKELKNIAYKPQLGLNALSNIVKVRINHIGEIVSVGEY

SEQ ID NO: 582 - protein, 79 aa, Nitritalea halalkaliphila
MPLRLPERVYKMISSTGAECHFLPVNVSSLIKGYDAKSKLGEFGSQNKQEVTSDSFIRVKERCYKLEINRLGIPLNRLK

SEQ ID NO: 583 - protein, 1498 aa, Odoribacter laneus
METTLGIDLGTNSIGLALVDQEEHQILYSGVRIFPEGINKDTIGLGEKEESRNATRRAKRQMRRQYFRKKLRKAKLLELLIAYDMCPLKPEDVRRWKNWDKQQKSTVRQFPDTPAFREWLKQNPYELRKQAVTEDVTRPELGRILYQMIQRRGFLSSRKGKEEGKIFTGKDRMVGIDETRKNLQKQTLGAYLYDIAPKNGEKYRFRTERVRARYTLRDMYIREFEIIWQRQAGHLGLAHEQATRKKNIFLEGSATNVRNSKLITHLQAKYGRGHVLIEDTRITVTFQLPLKEVLGGKIEIEEEQLKFKSNESVLFWQRPLRSQKSLLSKCVFEGRNFYDPVHQKWIIAGPTPAPLSHPEFEEFRAYQFINNIIYGKNEHLTAIQREAVFELMCTESKDFNFEKIPKHLKLFEKFNFDDTTKVPACTTISQLRKLFPHPVWEEKREEIWHCFYFYDDNTLLFEKLQKDYALQTNDLEKIKKIRLSESYGNVSLKAIRRINPYLKKGYAYSTAVLLGGIRNSFGKRFEYFKEYEPEIEKAVCRILKEKNAEGEVIRKIKDYLVHNRFGFAKNDRAFQKLYHHSQAITTQAQKERLPETGNLRNPIVQQGLNELRRTVNKLLATCREKYGPSFKFDHIHVEMGRELRSSKTEREKQSRQIRENEKKNEAAKVKLAEYGLKAYRDNIQKYLLYKEIEEKGGTVCCPYTGKTLNISHTLGSDNSVQIEHIIPYSISLDDSLANKTLCDATFNREKGELTPYDFYQKDPSPEKWGASSWEEIEDRAFRLLPYAKAQRFIRRKPQESNEFISRQLNDTRYISKKAVEYLSAICSDVKAFPGQLTAELRHLWGLNNILQSAPDITFPLPVSATENHREYYVITNEQNEVIRLFPKQGETPRTEKGELLLTGEVERKVFRCKGMQEFQTDVSDGKYWRRIKLSSSVTWSPLFAPKPISADGQIVLKGRIEKGVFVCNQLKQKLKTGLPDGSYWISLPVISQTFKEGESVNNSKLTSQQVQLFGRVREGIFRCHNYQCPASGADGNFWCTLDTDTAQPAFTPIKNAPPGVGGGQIILTGDVDDKGIFHADDDLHYELPASLPKGKYYGIFTVESCDPTLIPIELSAPKTSKGENLIEGNIWVDEHTGEVRFDPKKNREDQRHHAIDAIVIALSSQSLFQRLSTYNARRENKKRGLDSTEHFPSPWPGFAQDVRQSVVPLLVSYKQNPKTLCKISKTLYKDGKKIHSCGNAVRGQLHKETVYGQRTAPGATEKSYHIRKDIRELKTSKHIGKVVDITIRQMLLKHLQENYHIDITQEFNIPSNAFFKEGVYRIFLPNKHGEPVPIKKIRMKEELGNAERLKDNINQYVNPRNNHHVMIYQDADGNLKEEIVSFWSVIERQNQGQPIYQLPREGRNIVSILQINDTFLIGLKEEEPEVYRNDLSTLSKHLYRVQKLSGMYYTFRHHLASTLNNEREEFRIQSLEAWKRANPVKVQIDEIGRITFLNGPLC

SEQ ID NO: 584 - protein, 1389 aa, Oenococcus kitaharae; identical to SEQ ID NO: 241

SEQ ID NO: 585 - protein, 1535 aa, Ornithobacterium rhinotracheale
MNTILGLDLGTNSIGWALIKVLNDKTRLPLEIIDLGVVVIPTDQRTLDKFSKGESISKTAERTKQKGVRKLYERKKLRRERLHRVLNILGFLPEHYSKKIDFKKHLGQFFGNSQPKISYVENDHGKHEFIFMDSYREMLKEFSKHNIKNVPYDWTIYYLRKKALSQKISKEELAWVILNFNKKRGYYQFRDDNADENKENKIEKYYALKVTNVKKEDAQNYTITLENGWIYKNKSKISLLDWVGSTKEFISTEKFDNKGNIIKKKNGEDDRTLKLVDSEKDWIAIKKSTEDRIENYGKTVGTYLYEHLLKDPNQKLNGELINIIDRKFYKNELKQILEKQKEFHPELLNEDLFQKSIIELYPKNSTRQKELKNKDLCYLLIDDVIYYQRDLKKKNSTINKCSFESREYYLNGEKQIQKINCIAKSKPLYQEFRTLQFIKNLKVYEIIDGLEKDITSKLLPDFETKEHFFEWLNDKEKIDQLQLLSYKCFDLHDNVKNDLIAKGIKRPTEKAIRTELLEKYRWNYSKDNDRNFLLNETRFKILKYLKKVDKKLTLTNEQIESLWLLLYSAKDERELKNGLQKFSEKNKLPKKFSDIFISFPPFKKEYGAYSEKALKKLLSLVRFGKYWSFNKIDNNIQNKIMNILNGEVDDSISDRVREKTILLQDKNDFQDLPLWLASYVAYNRFSEVSEIKYWDSPDKIEFLKQHSIGNPIVEKIINETLKLIKDIWVIHGKSCKNFFSEIHIELSREIKSSSKKRAQITNNNTKNQKLNNLIKSLLIEMASDTKYENVTPYSPSQQEILKIYDEGIYSKEENSEKIKEINKIRNNNKISKSDITKYKLWLEQGYISPYTGKIIPLTKLFTAKYQKEHIIPQTKFFDDSFNNKVICEAEVNKLKDNSLAMNFIKAKGGKAVKLSDGETVTILNQEEYKQLVRTSFKKNSIKLRNLLLEEIPDTFTKRQLNDTKYISKLVLSLLSNIVREKGELESTAKRIVSTNGQITSILRNDWGLNNIWNKLITPRFERLNNINKNKIYGNWENKKGKNVFQINYLNDNLSTLNTKRIDHRHHALDALIVACTTRNHINFLNNQYAKSRNQRHDLRAKLKRRETITTEGSKKQVFKDFIKPWESFTQDALKKLETTIVNFKVNKRIINKTINWYKKWEKQKDGTYKKIQKKQTKGDAWAIRKPLHIDTIYGIVCKKLPLKSALENYKNIIDENLKHKIKELKEVNKFDNNQIINFFKECNFIFEDNNIQKVEVYDFKDNRDKTILSSSRQLIDESFTPKKIGKVLDPTIRNILLKHLNSTKYNNKFDSDGNPIKPEKLAFSPEGLKDLNKNIKHLNNNKEHQPIKRVKLFETLGNKIKVGYTQQKNKKFAETATGTNLFLGIYSDNNKRDFKTIPLILAIQREKEGLNPCPDTDEKGNQLLFSLSPNELVFVPNNEERKNPNLVDFENLSKDQIDRIYKFVSCTGSEAYFVPSRTAKPIIENENGTNNKSQRIIEFNEKTSIKNEKNEPVLIKTICWKIEVNRLGKIIKVIK

SEQ ID NO: 586 - protein, 103 aa, Parabacteroides merdae
MIVYRLFYRFLFKATKLVNFVIHKELKRQIARTGKIKFHSGGCGCQSGNYKMQNFEKGKSITTNADRTLKRSMRRNLYRCKLRRDVLIELLKKVGFIPEKQWK

SEQ ID NO: 587 - protein, 82 aa, Parabacteroides merdae
MSIWKLQYPPLDLKIYNKFLVYSRVNPLTVDEMQNFEKGKSITTNADRTLKRSMRRNLQRYKLRRDVLIELLKKVGFMSEKQ

SEQ ID NO: 588 - protein, 84 aa, Parabacteroides merdae
MSIWKLQYPPLDLKIYNKFLVYSRVNPLTVDEMQNFEKGKSITTNADRTLKRSMRRNLYRCKLRRDVLIELLKKVGFIPEKQWK

SEQ ID NO: 589 - protein, 398 aa, Pasteurella bettyae
MLANENQNKGNLTPYEWLDGKNNSKRWQDFVARVQTCCFSHRKKQHILSHKLDEKSFIERNLNDTRYVARFLCNFIADNMLLTGKGKRKVFASNGQITALLRGRWGLQKVRDDNDRHHALDAVVIACSTVAMQQKITRFVKYEEGNVFSGERIDRETGEIIPLYFPTPWKFFKENVEIRIFSENPKLELENRLPDYPQYNHEFVQPLFVSRMPTRKMTGQGHMETIKSAKRLDEGISVLKVPLTQLKLADLENMVNRERELALYEALKERLELFGNDPAKAFIEPFYKKGGALVKAVRVKKVQKSGVLVRDGNGVADNALMVRVDVFTKGGKYFLVPIYTWQVAKGILPNKAVTANIDEIDWLEMDESYQFIFTMYPNDLVKVKLKKEEFFGYYGGLD

SEQ ID NO: 590 - protein, 610 aa, Pasteurella bettyae
MNMLKPLNYILGLDLGIGSVGWAVVEIDEQGNPLRLIDVGVRTFERAEVAKTGESLALARRLARSSRRLVKRRAARIKKAKRLLKAENILLSVDEILPNDVWQLRVKGLDHKLERQEWAAVLLHLLKRRGYLSQRKNESKSENKELGALLSGVVTNHQILQTDEYRTPAEIAVHKFQAEDGHIRNQRGDYTHTFSRLDLLAEMELLFQRQTELGNLHTSSKLLENLTALLMWQKPALAGEAILKMLGKCTFEPTEYKAAKNSYSAERFVWLTKLNNLRILEQGAERALTDSERFVLLDQPYEKAKLTYAQVRTLLKLSDEAIFKGVRYQGEDKKTVESKTTLMEMKAYHQIRKALDGADLKDEWNTLKNDSALLDEIGTAFSLYKTDDDISHYLGGKLSEKVLNVLLENLNFDKFIQLSLKALQKILPLMLQGQRYDEAVSAVYGDHYGKKSAESCRLLPAIPANEIHNPVVLRTLTQARKVINAVVRLYGSPARIHIETGRKVGKSYQDRKKLEKQQEENREQRESAVKKFKEYFPNFVGEPKGKDILKLRLYELQQSKCLYSGKSFDPNRLLEKGYVEVDHALPFSRTWDDSFNNKVCLPMKTRIKAI

SEQ ID NO: 591 - protein, 199 aa, Pasteurella multocida
MACATPSMQQKITRFIRFKEVHPYKIENRYEMVDQESGEIISPHFPEPWAYFRQEVNIRVFDNHPDTVLKEMLPDRPQANHQFVQPLFVSRAPTRKMSGQGHMETIKSAKRLAEGISVLRIPLTQLKPNLLENMVNKEREPALYAGLKARLAEFNQDPAKAFTTPFYKQGGQQVKAIRVEQVQKSGVLVRENNGVADNA

SEQ ID NO: 592 - protein, 63 aa, Pasteurella multocida
MQTTNLSYILGLDLGIASVGWAVVEINENEDPIGLIDVGVRIFERAEVPKTGESLALSRRLAR

SEQ ID NO: 593 - protein, 1058 aa, Pasteurella multocida
MQTTNLSYILGLDLGIASVGWAVVEINENEDPIGLIDVGVRIFERAEVPKTGESLALSRRLARSTRRLIRRRAHRLLLAKRFLKREGILSTTDLEKGLPNQAWELRVAGLERRLSAIEWGAVLLHLIKHRGYLSKRKNESQTNNKELGALLSGVAQNHQLLQSDDYRTPAELALKKFAKEEGHIRNQRGAYTHTFNRLDLLAELNLLFAQQHQFGNPHCKEHIQQYMTELLMWQKPALSGEAILKMLGKCTHEKNEFKAAKHTYSAERFVWLTKLNNLRILEDGAERALNEEERQLLINHPYEKSKLTYAQVRKLLGLSEQAIFKHLRYSKESAESATFMELKAWHAIRKALENQGLKDTWQDLAKKPDLLDEIGTAFSLYKTDEDIQQYLEGKLPDSVINALLVSLNFDKFIELSLKSLRKILPLMEQGKRYDQACHEIYGHHYGEKNQQISQLLPVIPTQEIRNPVVLRTLSQARKVINAIIRQYGSPARVHIETGRELGKSFKERREIQKQQEDNRTKRESAVQKFKELFSDFSSEPKSKDILKFRLYEQQHGKCLYSGKEINIHRLNEKGYVEIDHALPFSRTWDDSFNNKVLVLASENQNKGNQTPYEWLQGKINSERWKNFVALVLGSQCSAAKKQRLLTQVIDDNKFIDRNLNDTRYIARFLSNYIQENLLLVGKNKKNVFTPNGQITALLRSRWGLIKVRENNDRHHALDAIVVACATPSMQQKITRFIRFKEVHPYKIENRYEMVDQESGEIISPHFPEPWAYFRQEVNIRVFDNHPDTVLKEMLPDRPQANHQFVQPLFVSRAPTRKMSGQGHMETIKSAKRLAEGISVLRIPLTQLKPNLLENMVNKEREPALYVGLKARLAEFNQDPAKAFATPFYKQGGQQVKAIRVELVQKSGVLVRQGNGVADNAPGSIVRTDVFIKNNKFFLVPIYTWQVAKGILPNKAIVAHKNEDEWEEMDEGAKFKFSIFPNDLIELRTKTECFLGYYIGPDRHNGSISLREHDSEISKGNAGVYRVGVKLALSLEKYHIDELGKNRRICRPHQRRPVR

SEQ ID NO: 594 - protein, 1056 aa, Pasteurella multocida
MQTTNLSYILGLDLGIASVGWAVVEINENEDPIGLIDVGVRIFERAEVPKTGESLALSRRLARSTRRLIRRRARRLLLAKRFLKREGILSTTDLEKGLPNQAWELRVAGLERRLSAIEWGAVLLHLIKHRGYLSKRKNESQTNNKELGALLSGVAQNHQLLQSDDYRTPAELALKKFAKEEGHIRNQRGAYTHTFNRLDLLAELNLLFAQQHQFGNPHCKEHIQQYMTELLMWQKPALSGEAILKMLGKCTHEKNEFKAAKHTYSAERFVWLTKLNNLRILEDGAERALNEEERQLLINHPYEKSKLTYAQVRKLLGLSEQAIFKHLRYSKENAESATFMELKAWHAIRKALENQGLKDTWQDLAKKPDLLDEIGTAFSLYKTDEDIQQYLTNKVPNSVINALLVFLNFDKFIELALKSLRKILPLMEQGKRYDQACREIYGHHYGEANQKTSQLLPAIPAQEIRNPVVLRTLSQARKVINAIIRQYGSPARVHIETGRELGKSFKERREIQKQQEDNRTKRESAVQKFKELFSDFSSEPKSKDILKFRLYEQQHGKCLYSGKEINIHRLNEKGYVEIDHALPFSRTWDDSFNNKVLVLASENQNKGNQTPYEWLQGKINSERWKNFVALVLGSQCSAAKKQRLLTQVIDDNKFIDRNLNDTRYIARFLSNYIQENLLLVGKNKKNVFTPNGQITALLRSRWGLIKIRENNDRHHALDAIVVACATPSMQQKITRFIRFKEVHPYKIENRYEMVDQESGEIISPHFPEPWAYFRQEVNIRVFDNHPDTVLKEMLPDRPQANHQFVQPLFVSRAPTRKMSGQGHMETIKSAKRLAEGISVLRIPLTQLKPNLLENMVNKEREPALYAGLKARLAEFNQDPAKAFTTPFYKQGGQQVKAIRVEQVQKSGVLVRENNGVADNASIVRTDVFIKNNKFFLVPIYTWQVAKGILPNKAIVAHKNEDEWEEMDEGAKFKFSLFPNDLVELKTKKEYFFGYYIGLDRATGNISLKEHDGEISKGKDGVYRVGVKLALSFEKYQVDELGKNRQICRPQQRQPVR

SEQ ID NO: 595 - protein, 134 aa, Pasteurella multocida
MVNKEREPALYAGLKARLAEFNQDPAKAFTTPFYKQGGQQVKAIRVEQVQKSGVLVRENNGVADNASIVRTDVFIKNNKFFLVPIYTWQVAKGILPNKAIVAHKNEDEWEEMDEGAKFKFSLFPNDLVELKTKK

SEQ ID NO: 596 - protein, 53 aa, Pasteurella multocida
YSKENAESATFMELKAWHAIRKALENQGLKDTWQDLAKKPDLLDEIGTAFSLL

SEQ ID NO: 597 - protein, 1366 aa, Pediococcus acidilactici
MGDRKYNLGLDIGTSSIGFAAVDENNQPIRVKGKTAIGVRLFEEGKTAADRRGFRTTRRRLSRRRWRINLLNEIFDAHLAEVDPTFLARLKESNRSNLDPKKSFQGSLLFPERKDYQFYEEYPTIYHLRKALMEEDRKFDIREIYLAVHHIIKYRGNFLNGTPMRSFKVENIELDTLFDQLNQLYAEIVPDNELAFDLAQVADVKDVLSSTTIYKMDKKKQLVKMMLLPASNKALQSENKKIVTQFVNAILNYKFKLDVLLQVETDADWSLKLNDEGADDKLEEFTGDLDENRLEIIDLLQRLHNWFSLNEITKDGNSLSAAMVEKYENHHHHLGLLKKVIENHPDAKKAKALKETYTAYVGKTDDKTQNQDDFYKAVEKNLDDSPDAKEIKRLIQLDQFMPKQRTGQNGAIPHQLHQQELDQIIEKQSKYYPFLAEPNPNVKRRKDAPYKLDELIAFKIPYYVGPLVTPEEQAQNKENVFAWMKRKAAGPITPWNFDEKVDRMESANRFIRRMTTKDTYLFGEDVLPAESMIYQKFVVLNELNNLKINGRHLSLKDKQDVYNDLFKQQKTVSIKALQNYYVTKKKAATAPTVGGLADPKKFLSSLSTYIDFKNMFGERVNDPQFQEDLEQIVEWSTIFEDRGIFKAKLQALGWLSEKQIQQLVAKRYKGWGRLSKKLLTGLKNAEGYSILDEMWRSTENFMQIQTRPEFAALIQQANEKQFEGNDPNNVWENIESILGDAYTSPQNKKAIRQVVKVVQDIEKAVGNPPEKIAIEFTREAAANPQRTQSRLRTLEKLYESAEEVVDAGLTAELAEFKENKHVLSDKYYLYFTQLGRDVYTGDTISLDKLNDYDVDHILPQSFIKDDSLDNRVLTIRAVNNGKSDNVPAKMFGKKMGSFWRYLLDNGMISKRKYNNLITDPDNISKYAQKGFINRQLVETSQVIKLTANILNGIYDKDTEIIEVPAKMNSQMRKMFDLVKVREVNDYHHAFDAYLTIFIGKYLYKCYPKLRPYFVYGKFKKFGDNEDIEVGDGRFNFLNRIERLKNVTDPETGEILWSNVAPNETIKQIKKVYNYKFMLVSRETTTRRAELFNQTVYPKNYRGKLIPIKEDRPTDLYGGYSGNTDAYLAIVALEDKKKGKYFKVVGIPTRAAAKLEKLKQQDSQQYLQALHKVIAPQFTKSTKKGIKKTEFEIVLDKVHYRQLVQDGPVKMMLGSSTYKYNAKQLVLSEKALQVIADDRKFDETQKDDNLIAVYDEILSIVNQSFDLYDINGFRKKLNDNRDQFIDLPAETKYEGRKVVAHGKREMILEILKGLHANAAFGNLKPIGFSTAFGQLQVPNGIILSKNAILIHQSPSGLFERKIKLSDL

SEQ ID NO: 598 - protein, 1229 aa, Pediococcus acidilactici; identical to SEQ ID NO: 130

SEQ ID NO: 599 - protein, 270 aa, Pediococcus lolii
LFNQTIYSAKASKTMIPIKNDRPTKLYGGYSGNEDAYMSIIRLSDKKKTYKVVGISMRDASKLKAYENNAHEEYLKKLKEVIEQQFLDSGKKTKADFEIVIPKVNYHQRMQDGTKQFRIGSSKYVHNTKQLVLSEKTLKAIRNNKQYNGDAEKDLINAFDEILTIVNDSFSIFDIRSFRKKLNESRDKFVSLPVEDTKEKSKVIKGKRETLKQILIALHANGTSQDIPQLGLKSFGKMVKTGGLTLSENTALIHQSPSGLFEHKIKLSDL

SEQ ID NO: 600 - protein, 1016 aa, Pediococcus lolii
MNGIFDAHLAEVDPTFLARLKESNRSNLDPKKSFQGSLLFPERKDYQFYKEYPTIYHLRKALMEKDRKFDIREIYLAVHHIIKYRGNFLNGTPMRSFKVENIELDTLFDRLNQLYEEIIPDNELAFDLEQVADVKEVLSSTTIYKMDKKKQLVKMMLLPASNKALQSENKKIVTQFVNAILNYKFKLDVLLQVETDADWSLKLNDEGADDKLEEFTGDLDENRLEIIDLLQRLHNWFSLNEITKDGNSLSAAMVEKYKDHRHHLELLKKVIEDHSDAKKAKALKETYTAYVGKTDDKTQNKDDFYKAVEKNLDDSPEAKEIKRLIQLDQFMPKQRTGQNGAIPHQLHQQELDQIIEKQSKYYPFLAEPNPNVKRRKDAPYKLDELIAFKIPYYVGPLVTPEEQAQNKENVFAWMKRKAAGPITPWNFDEKVDRMESANRFIRRMTTKDTYLFGEDVLPAESMIYEKFVVLNELNNLKINGRHLSLKDKQDIYNDLFKQQKTVSIKALQNYYVTKKKAATAPTVGGLADPKKFLSSLSTYIDFKNMFGERVNDPQFQEDLEQIVEWSTIFEDRGIFKAKLQALGWLSEKQIQQLVAKRYKGWGRLSKKLLTGLKNAEGYSILDEMWHSTENFMQIQTRPEFAALIQQANEKQFEGNDPDNVWENIENILGDAYTSPQNKKAIRQVVKVVQDIEKAVGNPPEKIAIEFTREAAANPQRTQSRLRTLEKLYESAEEVVDAGLTAELAEFKENKHVLSDKYYLYFTQLGRDVYTGDTISLDRLNDYDVDHILPQSFIKDDSLDNRVLTIRAVNNGKSDNVPAKMFGKKMGSFWRYLLDNGMISKRKYNNLITDPDNISKYAQKGFINRQLVETSQVIKLTANILNGIYDKDTEIIEVPAKMNSQMRKMFDLVKVREVNDYHHAFDAYLTIFIGNYLYKCYPKLRPYFVYDNFKKFGNKEDIGHKRFNFLGKIERDKKVVAPETGEILWSNVAPNETIKQIKKVYDYKFMLTSHETYTKHG

SEQ ID NO: 601 - protein, 1333 aa, Planococcus antarcticus
MKNYTIGLDIGVASVGWVCIDENYKILNYNNRHAFGVHEFESAESAAGRRLKRGMRRRYNRRKKRLQLLQSLFDSYITDSGFFSKTDSQHFWKNNNEFENRSLTEVLSSLRISSRKYPTIYHLRSDLIESNKKMDLRLVYLALHNLVKYRGHFLQEGNWSEAASAEGMDDQLLELVTRYAELENLSPLDLSESQWKAAETLLLNRNLTKTDQSKELTAMFGKEYEPFCKLVAGLGVSLHQLFPSSEQALAYKETKTKVQLSNENVEEVMELLLEEESALLEAVQPFYQQVVLYELLKGETYVAKAKVSAFKQYQKDMASLKNLLDKTFGEKVYRSYFISDKNSQREYQKSHKVEVLCKLDQFNKEAKFAETFYKDLKKLLEDKSKTSIGTTEKDEMLRIIKAIDSNQFLQKQKGIQNAAIPHQNSLYEAEKILRNQQAHYPFITTEWIEKVKQILAFRIPYYIGPLVKDTTQSPFSWVERKGDAPITPWNFDEQIDKAASAEAFISRMRKTCTYLKGQEVLPKSSLTYERFEVLNELNGIQLRTTGAESDFRHRLSYEMKCWIIDNVFKQYKTVSTKRLLQELKKSPYADELYDEHTGEIKEVFGTQKENAFATSLSGYISMKSILGAVVDDNPAMTEELIYWIAVFEDREILHLKIQEKYPSITDVQRQKLALVKLPGWGRFSRLLIDGLPLDEQGQSVLDHMEQYSSVFMEVLKNKGFGLEKKIQKMNQHQVDGTKKIRYEDIEELAGSPALKRGIWRSVKIVEELVSIFGEPANIVLEVAREDGEKKRTKSRKDQWEELTKTTLKNDPDLKSFIGEIKSQGDQRFNEQRFWLYVTQQGKCLYTGKALDIQNLSMYEVDHILPQNFVKDDSLDNLALVMPEANQRKNQVGQNKMPLEIIEANQQYAMRTLWERLHELKLISSGKLGRLKKPSFDEVDKDKFIARQLVETRQIIKHVRDLLDERFSKSDIHLVKAGIVSKFRRFSEIPKIRDYNNKHHAMDALFAAALIQSILGKYGKNFLAFDLSKKDRQKQWRSVKGSNKEFFLFKNFGNLRLQSPVTGEEVSGVEYMKHVYFELPWQTTKMTQTGDGMFYKESIFSPKVKQAKYVSPKTEKFVHDEVKNHSICLVEFTFMKKEKEVQETKFIDLKVIEHHQFLKEPESQLAKFLAEKETNSPIIHARIIRTIPKYQKIWIEHFPYYFISTRELHNARQFEISYELMEKVKQLSERSSVEELKIVFGLLIDQMNDNYPIYTKSSIQDRVQKFVDTQLYDFKSFEIGFEELKKAVAANAQRSDTFGSRISKKPKPEEVAIGYESITGLKYRKPRSVVGTKR

SEQ ID NO: 602 - protein, 211 aa, Porphyromonas catoniae
MGKKVLGLDLGVGSIGWCLITLDKDEKPQSILGMGSRIVPLSADDATEFTQGKAITKNKMRTVARTIRKGMDRYQLRREALKKVLREHAMLPDEALIKLPLLELWELRARAATPGEQVSLTELGRVLLHINQKRGYKHAKADEAAEAETKKGKETGYVAQVKGRYQILKEKGLTIGQHFAGELRANQQTAPRGTYYTYRIKEQVYPRVRGV

SEQ ID NO: 603 - protein, 1009 aa, Porphyromonas catoniae
MRIIREAYIEEYDRIMAVQRVFYPELLTDALIGRIRDRIIFYQRPLKSCKQLVSFCEFEKKEKVIRVKHTNKEGVQELVEKTITIGPKVAPKSSPIFQVCKVWESIHNIRLYHPDGTERKLEQEEKQKLFDYLQRNDKLSLTTLRKELKIKPKDKLWCDKLLEKGIAGNTTAAILRKAFKGYEHYERLFRFDLVRRDSHEADEDGVIRPIIDESYQNEPLYKLWHILYSIEDRAEMRSALIGQLGIKAEDLDNGLMDALYKIDFVKQGYGNKSAKFICKLLPHLQEGKMYSEAAEAAGMRHSDSMTAQERDERNLLEEIPLLQKNALRQPVVEKVLNQMINLVNALKREHGEIDEVRVELARELKMSREEREKATKNNSSREKENKAIAERITEYGLTPTKSRIQKYRLWQESAESCIYCGKRVDVVQFLRGEETEVEHIIPKSILFDDSLSNKACACRSCNQEKGNRFAMEYIQAKGWEQDYIERVDSLFHDKKISYSKRQHLLMLPKDLPEDFIERHLRLSQYISREAQGILRKGIRLVSASEGGVTAKLRQLWGYDNILRDLNLERYKSMGETEVVTVEHRDGQRTDERIKDWSKRKDHRHHAIDALVVACTRQSYIQRLNRVNAEADRQEMDAFIKEQQQEHKLSKKEKLSLLENWLKEQPHFTTGEVKEHAEGILISFRPGKRTVSRGRNIYKRSGKTDVQRNVLIPRGALSEETVYGVISVDGENKVVCKYPLQKFLDTKETNVDKIADQAAEKIVDKVLREKIRERIKRYGKKEAFAEPLYLDEAQTQVVRSVRCFISKDQAKLIPLRYNDESEAVGFVAPGNNHHLALYRDASGKMRASVVSFFAAVERARYGIPMIVLNPRETREKARIIPDLPESIFSKLPEEDWVLEETLQEGEMVLLGMENDAIEEAIKKKDYSKLSRYLYRVQSLSYNDYKFCFHLETESEKKEKKKGEDKKRGEKAKNTAVMPPKRYRIRCLATYQEDLNPRKVKIDLLGRISLA

SEQ ID NO: 604 - protein, 1197 aa, Porphyromonas sp.
MLMSKHVLGLDLGVGSIGWCLIALDAQGDPAEILGMGSRVVPLNNATKAIEAFNAGAAFTASQERTARRTMRRGFARYQLRRYRLRRELEKVGMLPDAALIQLPLLELWELRERAATAGRRLTLPELGRVLCHINQKRGYRHVKSDAAAIVGDEGEKKKDSNSAYLAGIRANDEKLQAEHKTVGQYFAEQLRQNQSESPTGGISYRIKDQIFSRQCYIDEYDQIMAVQRVHYPDILTDEFIRMLRDEVIFMQRPLKSCKHLVSLCEFEKQERVMRVQQDDGKGGWQLVERRVKFGPKVAPKSSPLFQLCCIYEAVNNIRLTRPNGSPCDITPEERAKIVAHLQSSASLSFAALKKLLKEKALIADQLTSKSGLKGNSTRVALASALQPYPQYHHLLDMELETRMMTVQLTDEETGEVTEREVAVVTDSYVRKPLYRLWHILYSIEEREAMRRALITQLGMKEEDLDGGLLDQLYRLDFVKPGYGNKSAKFICKLLPQLQQGLGYSEACAAVGYRHSNSPTSEEITERTLLEKIPLLQRNELRQPLVEKILNQMINLVNALKAEYGIDEVRVELARELKMSREERERMARNNKDREERNKGVAAKIRECGLYPTKPRIQKYMLWKEAGRQCLYCGRSIEEEQCLREGGMEVEHIIPKSVLYDDSYGNKTCACRRCNKEKGNRTALEYIRAKGREAEYMKRINDLLKEKKISYSKHQRLRWLKEDIPSDFLERQLRLTQYISRQAMAILQQGIRRVSASEGGVTARLRSLWGYGKILHTLNLDRYDSMGETERVSREGEATEELHITNWSKRMDHRHHAIDALVVACTRQSYIQRLNRLSSEFGREDKKKEDQEAQEQQATETGRLSNLERWLTQRPHFSVRTVSDKVAEILISYRPGQRVVTRGRNIYRKKMADGREVSCVQRGVLVPRGELMEASFYGKILSQGRVRIVKRYPLHDLKGEVVDPHLRELITTYNQELKSREKGAPIPPLCLDKDKKQEVRSVRCYAKTLSLDKAIPMCFDEKGEPTAFVKSASNHHLALYRTPKGKLVESIVTFWDAVDRARYGIPLVITHPREVMEQVLQRGDIPEQVLSLLPPSDWVFVDSLQQDEMVVIGLSDEELQRALEAQNYRKISEHLYRVQKMSSSYYVFRYHLETSVADDKNTSGRIPKFHRVQSLKAYEERNIRKVRVDLLGRISLL

SEQ ID NO: 605 - protein, 1422 aa, Prevotella denticola
MTQKVLGLDLGTNSIGSSVRNLDLSDDLKGQLEFFSSDIFRSSVNKESNGREYSLAAQRSAHSRSRGLNEARRRKLWATLDLLIKYGFCPMSPESLMRWRTYDKQRGLFREYPIDDKNFNAWILLDFDGDGKPDYSSPYQLRRELVIRQFDFDQPIERYKLGRALYHIAQHRGFKSSKGETLSQQETNSKQSLTDDTADVAGEMKASEEKLSKGLSTYMKENNLLTVGAAFAQLEDEGVRVRNNNDYRAIRSQFQREIETIFKFQQGLSVENELYERLVSEKKNIGTIFYKRPLRSQRGNVGKCTLERTKPRCAIGHPLFEKFRAWTLINNIKVRMSEEEQAEQLPMKLRFELYNDCFLAFVRAEFKFEDIRKYLEKRLGVHFSYNDKTINYKDSTSVAGCPITARFRKLLGEDWESFHVDGQKQRQAHGKNNASFHTVSYSTNDIWHFCYDAEEPEAVLSFAQDNLKWEKKKAEELVRIWSAIPQGYAMLSQKAIRNINKMLILGLKYSDAVLLAKVPEIVEITDGEILSVTEDYHRVEAQVGYEKQINNIVNALIAKYKSASEEYRFADHNYEYQLDKSDEKDIIKQIESNIGTRKWSLLDADEQTDILQKVRDKYQNFFRSHERKFVESPKLGECFEEYLMKKFPMVEGERWKKLYHPSQIAIYRPVPANKDRSALRLGNPDIGAIKNPTVLRVLNTLRKRVNQLLDDGIISPDETRVVVETARELNDANRKWALDTYNRIRHDENEKIKKILAEFYPKRDNISTVDIDKARYVIDQREMDYFTEAKTYHKDIKKYKLWLEQGGQCMYTGRTINLSNLFDPNSFDVEHTIPESISFDSSDMNLTLCDAHYNRFIKKNHIPADLPNYDKSVVIDGKEYSPIKPRLQRWADRVERLNRNVEYWRGQARRAQNKDRKDQCMREMHLWKMELEYWTKKLERFTITEVTDEFKNSQLVDTRVITRHAVLYLKSIFPHVDVQRGDVTAKFRKILGIQSVDEKKDRSLHSHHAIDATTLTIIPGAAKRERMLELFAKIEEVNKMLSFSGNEDRTGLKQELDGLKNQLNKEVKACRIGHNVSEIGTFINDNIIINHHVKNQALTPVRRRLRKRGHIVGGMDNPRWQTGDALRGEIHKASYYGAITQYAKDKEGKVLMKEGRPQINPTIKFVIRRELKYKKSSTDSGFASWDDLGKAIVDKELFALMKGQFPEGTSFKDACEQGIYMIKKGKNGEVDTKLYRIRHIRCKTKQKNALKIKEQAYKSEKEYKRYFYAAVGDLYAMCCYTNGKTREFKIYSLYDISCHRKVGVEDIPEFITDKKGNRLMLDYKLHTGDMILLYKENPEELYDLDNVSLSKLLYKINGFENDGLRIRMVNHLVAKEAMGESVKDYAKLPDIIRCGVKTIKFLVMGENRDFVIKNGKISFNHR

SEQ ID NO: 606 - protein, 443 aa, Prevotella disiens
MELDYWKGKYNRFTMTEIPEGFSRRQGMGIGLISRYAGLYLKTIFHKKDNPQKSNVYIVKGSITAEFRRIWNIQDDYEKKCRDNHIHHCIDAIVVGCIGKREYDLMAQFYRDEEKYRWEKKKKPFFKKPWETFTQDMLSLKDEVLTVHFNPSNFTKKAHKKVFTPKGIFVAQGDCARVKLHKESYFGAIEQKGEIKYVMRKELSALKIEDIKNIVDAVVKEKVLAVVKKKGFKQAMAEPIYMNEDKRILIKKVRLFVSQTNPLIVKKHRDLSSKEYKQNYYVDNEGNLMIAMYEGVKKNGKIDREITVVNNLEAAKFFRQSQKNNAEKQLISHLSPKNGYPLKTVLTQKQLVLMYEDSPKEIKLRDTKNMVKRLYQVVEIEKDGRVKLKFHQEARSEGLNKNSAAFKIQDTPESLYRHTKSNLKVLVNGVDFKINILGEISLI

SEQ ID NO: 607 - protein, 1375 aa, Prevotella histicola
MKKILGLDLGTTSIGWALVYESENTDEKSSIVRLGVRVNPLSVDEKGNFEKGKAITTNADRQQTHGARINLQRYKLRRENLKDCLQKQGWIGTEALCEEGKTSTFETYMLRAKAAEEEISLHELCRVLFMMNKKRGYKSNRKANNKEDGKLFDGMTVAKKLYEEHLTPAEYSFQLLSSGKKFKQEYYRSDLKEEFDRIWNEQQKYYPEILTDDFKQQLQGKSKGNTSKIFLGKYGIYSADLKGLDRKLQPLKWRVEALKQQVDKEVLAFVISDLNGQIASTSGLLGAISDRSKELYFNKQTVGQYLWTSLKETPHVSIKNKPFYRQDYLDEFEKIWETQATYHKELTPELKQEIRDIIIFYQRPLKSKKGLISVCELEQRKVKVTIDGKEKEISIGPKVAPKSSPMFQEFRIWQNLNNILLIDKGNNSIHPLYEEEKNLLYEELSVKEKLSKAEALKVLNKNSKQWDLNYKEIEGNRTQAVLYDCYNRIIVMTGHEEYNFKKLKASEIRSYVKTTFTGLGFNTDILEFDSSLTGHELEKQPMYQLWHLLYSYESDNSRTGNDALLRKLETAFGFPKEYAAVLSDVVFEDSYGNLSVKAMRKILPHLQAGLNYSQACEEAGYKHSRRSLTKNELDQKEYKEKLELLPKNSLHNPVVEKILNQMINVINAVIDEYGKPDEIRIELARELKIGAAERENMTRSINQGNAENKRIREILEKEFALSYISRNDIIKYKLYEELKSNGFKTLYSDTYISKDKLFSKDFDIEHIIPKARLFDDSLSNKTIEARDVNIAKSNKTAFDFISEKYDQQGIEAYKKKLDILLQDGSISKAKYNRLLMKEADIPSGFIDRDLRDTQYIAKKAYEILSDLVRNVTPTTGAVTSRLREDWQLVDVMKELNFEKYQKLGLVEVIEDRDGRKIKRIKDWTKRNDHRHHAMDALTIAFTKPSYIQYLNNLNARSDKNSSIYGIENKELHREDNKLRFNAPLPINEFRAEARRHLKSILVSVKAKNKVMTQNVNVIKTKHGVIKKVQLTPRGELHNATFYGTKKRPIIKMVKVGAALDEVTIKKVSSSFIREALLDRLHEYNGDAKKAFTGRNSIDKNPIYIDEEHKKTVPALVKTIEWEMYHPTRKLISPDLKIDKVIDKGIREILKTRLAKFNGDAQKAFSNLDENPIYKDEAKKITLKRVSLEGVSSVIPLHTLKDREGKLVVGKDGKPVLGDYVQTSNNHHIAFYMDENGNLQDNVVSFFEAAERKSQGVPVIDKNYNHDKGWNFLFTMKQNEYFVFPNEVTGFNPSEVDLMDEANYSIISPNLYRVQKMSKASGRDYWFRHHLEAMLNDDPKLRNSMFKRITSLKALEGIVKVRINCIGKIVAVGEYD

SEQ ID NO: 608 - protein, 1380 aa, Prevotella intermedia
MKRILGLDLGTTSIGWALVNEAENNNEASSIVRLGVRVNPLTVDEKSNFEKGKAITTNADRQLRHGARINLQRYKLRRQNLHDCLQKQGWLGTEAMYEEGKASTFETYKLRAKAAEEEISLHEFARVLFMLNKKRGYKSNRKANNKEDGQLFDGMTIAKKLYEEHLTPAEYSLQLLNKGKKFTQGYYRSDLNAELERIWDEQKKYYPEILTDEFKQQLEGKTKTNTSKIFLAKYGIYSADLKGLDRKFQPLKWRVEALQQQVDKEVLAFVISDLKGQIANTSGLLGAISDRSKELYFNKQTVGQYLWASLEENPHISIKNKPFYRQDYLDEFEKIWETQAAFHKQLTPELKQEIRDIIIFYQRPLKSKKSLISVCELEQRKVKATIDGKEKEITIGPKVAPKSSPVFQEFRIWQNLNNVLLIDNDTNEKRPLDEVERNLLYKELSIKAKLSKTEALKILNKKGKQWDLNYRELEGNRTQAILFDCYNRIITLTGHEECDFKKIKASEIRHYVSTIFKNLGFSTEILDFDPSLKKHELEKQPMYQLWHLLYSYESDNSRTGNESLLRKLETTFGFPEEYATVLCDVVFEEDYGNLSVKAMREILPYLQAGNDYSQACAYAGYNHSRHSLTKEELDQKVYKERLELLPKNSLRNPVVEKILNQMINVINAIIDEYGKPDEIRIEMARELKSSAADRKKTTHAISQGNAENQRIREILEKEFSLSYISRNDIIKYKLYEELEPNYYKTLYSDTYITKDKLFSKDFDIEHIIPKARLFDDSFSNKTLEARNINLEKSNKTAFDFIKEKYGEDGAEAYKKKLDMLLENDAISRPKYNNLLRAEADIPSDFINRDLRNTQYIAKKACEILGELVKTVTPTTGKITNRLREDWQLVDVMKELNFEKYEKLGLTEIVEDRDGRKIKRIKDWTKRNDHRHHAMDALAIAFTKPSFIQYLNNLNARSNKGDSIYAIENKELHYEEGKLRFNAPIPVNEFRAEAKRHLSAILVSIKAKNKVMTQNVNKIKTKHGIIKKIQLTPRGPLHNETIYGTKMRPIIKMVKVGAALDEATINKVSSPAIREALLKRLNEYSGNAKKAFTGKNTLEKNPIYLNAGRTKTVPSLVKTVEWESFHPTRKLIDKDLNVDKVVDKGIREILKARLEEFNGDAKKAFSNLEENPIYLDEAKKIALKRVSIEGVLSAIPLHTLKNQAGKPITGKDGKPVLGNYVQTSNNHHIAFYYDEDGNLQDNAVSFFEAAERKSQGIPVIDKDYNRDKGWRFLFTMKQNEYFVFPNEATGFIPSEVDLTDEANYGIISPNLYRVQKVSRIDKGTSASRDYWFRHHLETILNDDAKLKNLAFKRIRGLLELKDIIKVRINSTGKIVAVGEYD

SEQ ID NO: 609 - protein, 129 aa, Prevotella multiformis
MQKGGTGCKINRQTVGNVEVNVLNLRLYDRTDDREVTAGYLPTKEDYVRLFVYLNDRKEINQDTLLKDYFRLKKVKCGNEKEFAIRWNYIEDKEKKYPCNETRHELLAALDRAGMEHGWLDDSGTSARW

SEQ ID NO: 610 - protein, 535 aa, Prevotella multiformis
MVKGLLSNIVRTAEEREETSKFVISCTGRITDRLKQDWGLNDVWNSLVYTRFKRLNELTETEAFGHWQDKDRRVFQTSVPLELQRGFSKKRIDHRHHAMDALVIACASRNIIGYLNNESAESPEKREDLRRKLCDKNHIIRKPWESFTQDARAALEDIVVSFKNYVRIINKATNYYERYDADGRKTKAEQKGGEMWAVRKPMHEATYYGKVNLRRKERVSLKAALEDIPSICNRDLRDYINGLVEKHFNKEQVLAQFRSVGNRWNKQHIDKVDVWRFSDGKEEMVATRKPLDTSFDAKRIEAVTDTGIQRILSNYLEAKGGDPKIAFTPEGIADMNQHITAYNNGKQHKPILKVRVSTKLGKKYPVGQTGCKAGQFVVAEAGTNLYFAVYEDGEGNRSYDTIPLNEAVECLKQGLPPVPETREKGDRLKFYLSPNDLVYVPAGDEENEIDRERIYKFVDSSGTTANFIPHRTAGLIYNVDKKLAEALCNGSIIQNEYGVGSQQSKNQKALTGEMVKAVCWKLEVDRLGNILRIIK

SEQ ID NO: 611 - protein, 1380 aa, Prevotella nigrescens
MKRILGLDLGTTSIGWALVNEAESNNEASSIVRLGVRVNPLTVDEKSNFEKGKAITTNADRQLRHGARINLQRYKLRRQNLHDCLQKQGWLGTEAMYEEGKASTFETYKLRAKAAEEEISLHEFARVLFMLNKKRGYKSNRKANNKEDGQLFDGMTIAKKLYEEHLTPAEYSLQLLNKGKKFTQGYYRSDLNAELERIWDEQKKYYPEILTDEFKQQLEGKTKTNTSKIFLAKYGIYSADLKGLDRKLQPLKWRVEALKQQVDKEVLAFVISDLKGQIANTSGLLGAISDRSKELYFNKQTVGQYLWASLEENPHISIKNKPFYRQDYLDEFEKIWETQATFHKQLTPELKQEIRDIIIFYQRPLKSKKSLISVCELEQRKVKATIDGKEKEITIGPKVAPKSSPVFQEFRIWQNLNNVLLIDNDTNEKRPLDEDERYLLYKELSIKAKLSKTEALKILNKKGKQWDLNYKELEGNRTQAILFDCYNRIITLTGHEECDFKKIKASEIRHYVSTIFKNLGFSTEILDFDPSLEKHELEKQPMYQLWHLLYSYESDNSRTGNESLLRKLETTFGFPEEYATVLCDVVFEEDYGNLSVKAMRKILPYLQAGNDYSQACAYAGYNHSRHSLTKEELDQKVYKERLELLPKNSLRNPVVEKILNQMINVINAIIDEYGKPDEIRIEMARELKSSAADRKKTTHAINQGNDENQCIREILEKEFALSYISRNDIIKYKLYEELKPNGFKTLYSDTYIPKDKLFSKDFDIEHIIPKARLFDDSYSNKTLEARDINLAKSNKTAFDFVKEKYGEQGAEAYKKKLDMLLGNNVISKPKYNKLLMTEADIPSDFINRDLRNTQYIARKACEILGELVRTVTPTTGKITNRLREDWQLVDVMKELNFEKYEKLGLTEIVEDRDGRKIKRIKDWTKRNDHRHHAMDALAIAFTKPSYIQYLNNLNARSNKGDSIYAIENKELHYEEGKLRFNAPIPVNVFRAEAKRHLSAILVSIKAKNKVMTQNVNKIKTKHGIIKKIQLTPRGPLHNETIYGTKMRPIIKKVKVGAALDEATINKVSSPAIREVLLKRLNEYSGNAKKAFTGKNTLDKNPIYLNAERTKTVPASVKTVEWENYHPIRKPITPDLKVDKVIDKGIGEILKARLEEFNGDAKKAFSNLEENPIYLDQTKKIALKRVSIEGVLSTIPLHTLKNQAGKPIMGKDGKPVLGNYVQTSNNHHIAFYYDEDGNLQDNAVSFFEAAERKSQGISVIDKDYNRDKGWRFLFTMKQNEYFVFPNEATGFIPSEVDLTDEANYGIISPNLYRVQKMSRIEKGTSVSRDYWFRHHLETILNDDSRLKNSAFKRINSLKPLEGIIKVRINSIGKIVAVGEYD

SEQ ID NO: 612 - protein, 1506 aa, Prevotella nigrescens
MKTILGLDLGPNSIGWAKVEVDDEGNYLRNIKLGSRIIPMTQDMLGDFDKGVKVSQTAIRTDFRGNRRLIERHLLRRERLHRVLHALKFLPKHYEDAIGWDRNEPATYGKFVNNSEPKLAWERQEDGSMRFLFMESFNEMVADFAQNQPSLVSDGKKIPLDWTIYYLRKKALTRPIKKEELAWILLNFNQKRGYYQLRGEEEEDNLTKRKEYYKLKVVGVEADGAPKGGKTWYNIHLENGWTARCQSKIPLDDWVGKVKEYIVTTEYEDDGKTPKCDKEGKVKRSFKSPEKDDWQLIKTRTEKFIDDSNKTVGAFIYDYLLEKPFDKIRGKYIRTIERKYYKNELREILREQTKYHEGLHSLEALKICAEELYKNNQQHQEYLLKKDMTFLLLNDLIFYQRPLKSKKSLIADCPYEVYKYDDKLTGKKGQKKIKCIAKSNPYYQEFRLWQFIANLRLFSVTDGKEVTAEYLKTEEDYVRLFSFLNDRKDIKQETFLRSFLKLKKESIGSEKIYPIRWNYIEDANKSYPCNATRHELLLAFDRADIPRELLDVEEREYRLWHLLYSIEAKEETESALRKLKANKAFGDLNIDDAFVNSFLKIKPFEKEYGAYSEKAIKKLLAVMRRGSLWKEADICEATKQNIAKILQNDIDEKLKKKIEAAVSSFNKLSDFQGLPTWLACYVVYGRHSEAAQIQCWQSPEDLKTYINKFKQHSLRNPIVEQCLLETLRTVYDIWKDAGQIDEIHIELGRNMKSTAEQRARKTKDILRNENTNLRIKNLLVELKNDDKIENVRPYSPSQQEILRIYEEGALQELSKEDEMFEDISKISKMAQPSPTELSRYKLWLEQKYRSPYTGRVIPLSKLFTTAYQIEHIIPQSRYFDDSFNNKVICESEVNSLKDNMLGYEFIKECGGRIVHCTLLGDVKIFTKEEYKDFVTKHYIDNTYKRDKLLLEDIPQEFSARQLNDSRYISKMVQTVLSNIVRAENEQEATSKFVVSCNGAITNRLKKDWGLNDVWSSIVCPRFKRLNEITKTNAFGHWEDKAGKHVFQTTVPLELQRGFSKKRIDHRHHAMDALVIACASRNIVNYLNNESANSPEKREDLRKKLCDEKRKIRKPWKTFTQDAREALSDVVVSFKNYVRVINKATNYYEHYSSSGNKVMISQKGNDMWAIRKPLHKESVFGRVNLCRKVIVSLKKALENIPAICDKTLRDYINALVEKHFNTRQLLAHFKSINYRLNRQCVEKVEVWQFSDEKIEMVARRKSLDTSFDDKQISSITDTGIQKILLNYLQTKDGNAEIAFTPEGIEEMNKNISLYNDGKAHQPILKVRVATPKGMKYPVGQTGNKATKFVVAEKGTNLYFAIYENELGVRSYDTIPLNIVVERLKEGLSPVPQANEADIPLKFYLSPNDLVYVPTKENEDELCRDRIYKFVDSSGTTANFVPHTSANTIYNVDKEYAEKCCNGAVFLNEYGLGSPQSKNQRALTGEMIKEICWKLKVDRLGNIIKVIK

SEQ ID NO: 613 - protein, 774 aa, Prevotella oulorum
MEQCILETLRTVYDIWKEAGQIDEIHVELGREMKQTAEQRAHLTEKVLRNENTNLRIKSLLMELKNDADMKDVRPYSPMQQEILRIYEEGALQTLSKDDAAFTEIMKISKMAQPSASELQRYRLWLEQKYRSPYTGKPISLSKLFTSAYQIEHIIPKKRYFDDSFSNKVICEAEVNGKKDSMLAYEFIKDCGGDVIHCTTLGDVTILSEAEYKALVTELYANNKSKKDKLLMEDIPQDFINRQLNDSRYISRVVMTLLSNIVRIEGEEEATSKFVIPCSGGITDKLKKDWGLNDVWNNIVYPRFERLNALTNTSDFGQWENKEGKRVFQTSVPLELQRGYQKKRIDHRHHAMDALVIACASRKIINYLNNQEANDPTKQENARKQLCIKSRIIRKPWETFTQDAYKALDNIVVSFKNYVRVINKATNYYERYNADGKKAVDEQKGEAMWAIRKPMHKDTVFGHVNLRRKAVVKLKDALENIPAICDKTLRHYIQDLQKKHFNTKQLLAHFKSINYRLNKQAVDKVEVWQYSDDKEQLAATRKPLGPSFDAKCIAAITDTGIQKILLNYLQAKGGDPAIAFTPEGIAEMNQNIAVYNGGKQHQPILKVRIAKPMGKKFPIGQTGNKAFQYVIAEEGTNLYFAIYEDEEGNRTYDTIALREVVERLKQGLTPVPEKNEKGVALKFHLSPNDLVYVPTADELLSKVCSLDKNRIYKMVSATKSECLFIPHSVAKTIYDKVEFEALNKMGRALTGEMIKSVCWKIEVDRLGHIVNIIK

SEQ ID NO: 614 - protein, 691 aa, Prevotella oulorum
MKTILGLDLGTNSIGWAKVIVDDNENYLRDIQLGSRIIPMSQDVLGKFDKGVTESQTAIRTSFRGVRRLRERTLQRRERLHRVLHTLHYLPPHYDSAIGWDRKTPTTYGKFLNHGEPKLAWERREDGTMQFLFMDAFHEMIADFAKYQPALVADGKKVPLDWTIYYLRKKALTQPIKKEELAWILLNFNQKRGYYQLRGEEDEENAAKHEEYHELKVVGVEVDEAGKGDNTWYNVKLENGWTYHRQSKIPLDDWVGKVRAFIVTTEYEKDGTTPKKDKEGNVKRSFRSPDEKDWGLRKKQTEHSLEASGTPVGAFIYDHLLKEPSDKIRGKFIHTIERKYYKQELAAILREQSKHHEKLCSKDMLKACIEELYPNNPLHRESLLKKDMPYLLIEDLIFYQRPLKSKKSLIAECPYEAYSYVDKETGEMKRQGIKCIAKSNPYYQEFRLWQLIANLRLRNRSDERDVTAEYLPHQEDYVRLFTYLNDRKEINQETLLKDFFKLKKVTIGGEKVFPIRWDYIEDKEKKYPCNATRHELLLALDRAGIEHDWLNDRDLAYRLWHLLYSVDSKDETERALRKLKDDDAFVESFLKIKPFEKEYGAYSEKAIKKLLPVMRRGSLWNEADLCPSTKERIANILQGTIDEKLKKKIGAFISSCQQVSDFQGLPEWLACYVVYGRHSEATDIQRWETPE

SEQ ID NO: 615 - protein, 242 aa, Prevotella saccharolytica
MKLVLGLDLGVGSVGWALIFITDSGEPIKILALGERIVSMDSNNSNEFSAGATCTLNQKKTKAKSVRKGYSRYVQRRDALTAELRHIGMMPDETLIKLPVLDLWQLRANAATEGKKLSLAEIGRVLYHINQRRGYKHGKSDVSSDNKQKGYVKAVNERYCMIQERQQTIGQYFALKLKETAVTTEKGTFYTFRIKDQVFPREAYEEEFVVAYSTKVLKFKQITTLLNVVICLMMLLLIVQRY

SEQ ID NO: 616 - protein, 1174 aa, Prevotella sp.
MEFHPELCDAELLKACAEELYRNNEAHRAQLLAKDFKHLLVEDVLFYQRPLKSKKSLIANCPYETRQYINKETGEIKDVNVKCIAKSNPYFQEFRLWQWISNLRLLRQADGQDVTAAYIKGNEDKERLFDLLNNQGEIKQEHILRDFLKLKKPKGGEFPLRWNYVDDKIYPANETRHAINKAIKGMAVDKEEKETLGQLLDQPAVAYMLWNLLYSITDRNELARALRRFALTHGVSSVDAFVESFLKVKPFKKEYGAYSEKATKKLLQVMRLGKYWCGDELPEPAKRTKGNKQAVYDEMAHRGICKQTLQNISNIIEENIDERLMGALLNPERPLTELSHFQGLSVSDACYVVYGRHSEVAEIVKWKDADELNTFINNFKQHSMRNPIVEQCVLETLRTVRDVWEQEGQIDEIHVELGRNMKRTAEQRARDTQAIQRNENTNMRISLLLTELKNDPSISDVRPYSPSQRELLKIYEEGALENLTNQDEDIAKISRLAQPSASELRRYKLWLDQKYVSPYTGRPIPLAKLFTPAYEIEHIIPQSRYFDNSFSNKVICEAEVNKLKDNLLGMEFIKKFGGKTKGILDEEAYKLHVTTNYAHNPAKRSKLLMEDLPTDFNSRQLNDTRYISKTVMALLSNVVREEGERETRSKHVVVCTGGVTDTLKKDWGLHDVWHNLVYPRFIRLNNLTGSQNFGYWRYLNEENSKKGEDSKKVFQITLPPECQRGFVKKRIDHRHHAMDALVIACASANIVNYLNNQSAANPHIHENLQRLLCDRKREIRKPWPTFTQDAQAALKDLVVSFKNTVRVVNKASNTYLRYDKDGKKKRFKQEGEGLKAIRKPMHKETYYGEVNLIRKEMVPLKRALDDVNAIVDKELRASIKGLLRDGFNPQQVLANFKAKDFKFDKRDIKKVEVYVSSEKSTPMVATRKSLDTSFNAKRIADITDTGIQKILLNYLKANDNSPEQAFTPEGIAYLNEHIAEYNDGKPHQPILKVRVSEVKGAKFAVGQTGSKKDKFVEAQSGTNLYFAIYEDKEGKRHFETIALKVAAERLKDKQMPVPEINDAGLPLKFYLSPNDLVYVPTDEDRATAHPSIDKMRIYKMVSATDRQCFFLPFTVASVISNKVEFEALNKMERVLDASEYSSAYDSSHVNKVMVKNVCWKLEVDRLGNITKIVR

SEQ ID NO: 617 - protein, 992 aa, Prevotella sp.
MITRILGLDTGTNSLAWAVVDRDANGNYTLVKRGDVIFTEGVKIEKGIESSKAAERTAHKALRVHYSRRRLHKIDTLKVLVELNLCPCLSDEQLSQWKAKKTYPLTDDFMLWQRSGSAEENNPYYCRHRCLTQKLDLTDQSQRFLLGRAFYHLAQRRGFLSNRLDTSADSDESGKVKSGIAQLSVEMEKAGCEFLGEYFYQLYKQHGNTIKLRSRYTDREEHYKKEFLAICEKQELDPKWVEALQRAIYFQRPLKSQRKGVGKCTFEPKKPRCAESHPDYEAFRMLCFLNNVKIQTPNDTSLRPLNEDEREKIWPIFFRKSKPNFDFEDIAKALAGKNNYAWYKDAGEKPFKFNYRMQQGVSGCPVTAQLIDIFGSDWQTAIAETYTAVEKKNGTKTIDEMADDVWNVLYSFSSKDKLKAFATEKLQLDEASATKFANAKLPHGFASLSLKAIRNILPFLRQGFIYAHAVHLAKIPDIVTKAVWNDADKREMILSGLMEIIENYNPKDRGVEGTIDFCIKSHLQDVIDLRPGAADALYHPSMIETYPDAKLNKMGVFQLGSPRTNAIRNPMAMRSLHILRSVVNQLLRDGIIDRDTEVHVEYARELNDANKRKAIADYQREQEKKRKQYRDDIIALYKSECHKEIEPTDTDILKFQLWEEQNHLCLYTGTQIGICDFLGDNPKFDIEHTVPRSVGGDSTQMNLTLCDATFNRQVKGAQLPSQLSNHADILVRIDHWKSKCEDLRKQLDKIRTYGGMEKNMKDRLIQKRHRLKMDLDYWQGKYSRFTMTEVPEGFSRRQGAGIGLVSKYAGLFLKSLFHNEQNPNKSNVYVVKGVTTAEFRRMWGLQGEYEKKSRLNHCHHCIDAITIACIGKAEYDKMAQYYHDEELFQWRGTTTKPHFNKPWPTFTEDVLAIEQSLLVKHLTKDNMPKQAKKRVRTATGKYLAQGDTARGSLHKDTYYGAIEQNGEIRYVLRKPLNKFENEAELEKIVDQA

SEQ ID NO: 618 - protein, 1375 aa, Prevotella sp.
MKKILGLDLGTTSIGWALVNESENKDEQSSIVRLGVRVIPLTVDEKGNFEKGKAITTNADRQQVHAARINLQRYKLRRENLRDCLQKQGWIGSEPMCEDGKSSTFETYKLRAKAAVEEVSLHEFARVLFMLNKKRGYKSNRKANDKEEGKLFDGMTIAKKLYEEHLTPAEYSLQLLNTGRKFTPEYYRSDLIEEFEKIWNEQQKYYPEILTDEFKQQLEGKAKSNTSKLFLGKYGIYSADTKGLDRRLQPLKWRVEAMKQQVDKDVLAFVISDLKGQIANTSGLLGAISDRSKELYFSKQTIGQYLWASLQENPHISIKNQPFYRQDYLDEFEKIWETQATYHKELTSELKQEIRDIIIFYQRPLKSKKNLIAVCELEQRKVKVTVDGKEKEITIGPKIAPKSSPMFQEFRIWQNLNNILLLDHETNSKRPLYEEERNLLYEELSVKEKLSKTEALKVLGKKSKQWDLNYKELEGNRTQAVLYDCYNRIIVMSGHEECNFKKLKASDIRHYVKMIFKNLAFNTDILCFDSSLKGHELERQPMCQLWHLLYSYEGDNSRTGNDALLRKLETSFGFPKEYAAVLADVIFEDSYGNLSVKAMRNILPHLQAGKDYSQACEEAGYKHSRRSLTKEELNQKVYKEKLELLPKNSLHNPVVEKILNQMVNVINAVIEEYGKPDEIRIELARDLKIGAAERENMTRSINQGNAENKRIREILEKEFALSYLSRNDIIKYKLYEELKSNGFKTLYSDTYISKDKLFSKDFDIEHIIPKARLFDDSLSNKTIEARDVNIAKSNKTAFDFILERYGEQGVKTYKTKLLRLLEDGAISNKKYNNLLKTEADIPSGFIDRDLRNTQYIAKKAYEILSELVKIVTPTTGSVTNRLREDWQLVDVMKELNFEKYQKLGLADVIEDRDGRKVKRIKDWTKRNDHRHHAMDALTIAFTKPSYIQYLNNLNARSDKSSSIYGIEVKELHREEGKFRFNAPLPINEFRAEAKRHLKSVLVSIKAKKKVMTQNVNKIKTKHGIIKKVQLTPRGELHNATYYGTKKRPLVRMVKVGAALDEATIKRVCSPAIRAALLKRLNAYNGDAKEAFTGRNSIDKNPIYLDIEQTKLVPVLVKTIEWGMYHPIRKRITPDLKIDKVIDKGIREKLKARLAEFNGDAQKAFSNLDENPIYMDEAKRITLKRVSIEGVLSAIPLHTLKDKAGKPVIGSDGKPVFGDYVQTSNNHHIAFYIDDKGNLQDNPVSFFEAAERKSQGVPVIDRRYNCDKGWHFVFTMKQNEYFVFPNEATGFIPSEVDLLDEANYCIISPNLYRVQKLSKASGRDYWFRHHLETMLNDDLRLKNSTFKRIQSLKGLEDIVKVRINSIGKIVAVGKYD

SEQ ID NO: 619 - protein, 1483 aa, Prevotella sp.
MKTILGLDLGTNSIGWAKVSVDDYGNYLHDIKLGSRIIPMSQDVLGNFDSGVTVSQTAQRTEFRSKRRLVQRNLQRRERLHRVLHVLDFLPAHYDAAIGWDRTEAVTYGKFLNHAEPKLAWEELGNGKRRFLFMDSFHEMVADFARCQPALVADGKKIPLDWTIYYLRKKALTQAITKEELAWILLNFNQKRGYYQLRGEEEEENPTKQEEYYELKVVSVEATDSRKGNDTWYNVHLENGWIYRRSSKISLDDWVGKVKQFIVTTEYEKDGTTLKTDKEGNVKRSFRAPNENDWGLRKKRTETLLEMSGKTVGAFIYDHLLQEPADKIRGNFIRTIERHYYKAELEAILAEQCKYHIELRDKEMLEACARELYLNNLPHQRSLMKKDMTYLLLYDLIFYQRPLKSKKALIANCPYEYYEYVDKETGEIKRQNIKCIAKSNPYFQEFRLWQFVLNLRLFDRVEDKEVTANYLPTADDHARLFTYLNDRKEINQETLLKDYFKLKKVKIGNEKEYPIRWNYIEDKEKKYPCNETRYELLMALDRAGIEHKWLDDNNLEYRLWHLLYSVEVKSESETALRKLKNDDAFVNSFLKVKPFKKEYGAYSEKAIKRLLAVMRKGFLWNEQDICDETRKRIEIIIKGDVDEKVKERMGHAAYSFDRVSDFQGLPEWLACYVVYGRHSEAMDIQRWDSPERLMAYINNFKQYSLRNPIVEQCILETLRTVHDIWKETGQIDEIHVELGREMKSTSEERARRTQNVLRNENTNLRIKSLLIELKNDTDICNVHPYSPMQQEILRIYEEGALQELNREDEDFEEISKISQMSQPSGKELNRYKLWLEQKYRSPYTGKAISLAKLFTPAYQIEHVIPQSRYFDDSFTNKVICEAEVNTLKSNLLGYEFIKKHGGEIIHCTTLGDVRIFSESEYKAFVMDHYANNKSKKDKLLMEDIPQEFLSRQMNDSRYISKVVKTLLSNIVRMADESEATSKSVIVCTGGVTDRLKKDWGLNDVWNSIVYSRFERLNRLTGTEAFGHWENKDGKRVFQTSMPLELQRGFRKKRIDHRHHAMDALVIACASRNIVNYLNNESANNPKKREDLRRQLCDKNRVIRKPWETFTQDAYNALENVVVSFKNYVRVINKATNRYEHYDENGKKRFVQQKGSELWAIRKPMHKETYYGHVNLRRKELVTLQKALDDIPSICDKKLRDYISALVEKHFNKRQLLAHFKSTDYYWQKQYVNKVYVWTFSDDIKPLVATRKLLDTSFDAKRIGTITDTGIQKILRNYLEAKGGNATLAFTPEGIVEMNQNISKYNDGKPHQPILKVRITEPMGAKYRVGQTENKMAKYVEAQSGTNLYFAIYEDSEGKRSYTTVPLDEVAERLKQRLSPVPEKDENDVPLKFYLSPNDLVYVPTEEELQLRECKLNKDRIYKMVSSTGSECHFIPYYVANVIYNKVEFEAKNKIGRALTGEMIKAVCWKLEIDRLGNILKVIK

SEQ ID NO: 620 - protein, 593 aa, Prevotella sp.
MNTRILGLDTGTNSLAWAVVDRDAKGNYTLVRRGDVIFTEGVNVDGQPVPSKAAVKSKYKSLRVQYARRRLRKIDTLKVLVSLDLCPYLSDQQLSQWKAKKTYPLTDDFMLWQRSGSAEENNPYYCRYRCLTQKLDLTDQSQRFLLGRAFYHLAQRRGFLSNRLDTTSDSAESGKVKSGIAQLSVEMEKAGCTFLGEYFYQLYKQHGNTVRLRSRYTDREEHYIKEFLAICEKQELDAQWVEKLQRALYFQRPLKSQRKGVGKCTFEPKKPRCAESHPDYEAFRMLCILNNIKIKTPKDVSLRPLNAEEREKVWPLFFRKSKPNFDFEDIAKALAGKNNYAWYKDAGEKPFRFNYRMHQGVSGCPVTAQLIDIFGSDWKAGIAETYTAVGKKNGTKTIDEMADDVWNVLYSFSSKDKLKAFATDKLQLDEARATKFANAKLPHGFAALSLKAIRNILPFLRQGFIYAHAVLLAKIPDIVTAAVWDDADKREQILSGLLEVIENYNPDDRGIEGTIDFCIKSHLQDVVDLRPGAADALYHPSMIEAYPDAKLNKMGVFQLGSPRTNAIRNPMAMRSLHILRSVVNLLLRDGMLS

SEQ ID NO: 621 - protein, 1424 aa, Prevotella sp.
MTQKVLGLDLGTNSIGSAVRNLDLSDDLQWQLEFFSSDIFRSSVNKESNGREYSLAAQRSAHRRSRGLNEVRRRRLWATLNLLIKHGFCPMSSESLMRWCTYDKRKGLFREYPIDDKDFNAWILLDFNGDGRPDYSSPYQLRRELVTRQFDFEQPIERYKLGRALYHIAQHRGFKSSKGETLSQQETNSKPSSTDEIPDVAGAMKASEEKLSKGLSTYMKEHNLLTVGAAFAQLEDEGVRVRNNNDYRAIRSQFQHEIETIFKFQQGLSVESELYERLISEKKNVGTIFYKRPLRSQRGNVGKCTLERSKPRCAIGHPLFEKFRAWTLINNIKVRMSVDTLDEQLPMKLRLDLYNECFLAFVRTEFKFEDIRKYLEKRLGIHFSYNDKTINYKDSTSVAGCPITARFRKMLGEEWESFRVEGQKERQAHSKNNISFHRVSYSIEDIWHFCYDAEEPEAVLAFAQETLRLERKKAEELVRIWSAMPQGYAMLSQKAIRNINKILMLGLKYSDAVILAKVPELVDVSDEELLSIAKDYYLVEAQVNYDKRINSIVNGLIAKYKSVSEEYRFADHNYEYLLDESDEKDIIRQIENSLGARRWSLMDANEQTDILQKVRDRYQDFFRSHERKFVESPKLGESFENYLTKKFPMVEREQWKKLYHPSQITIYRPVSVGKDRSVLRLGNPDIGAIKNPTVLRVLNTLRRRVNQLLDDGVISPDETRVVVETARELNDANRKWALDTYNRIRHDENEKIKKILEEFYPKRDGISTDDIDKARYVIDQREVDYFTGSKTYNKDIKKYKFWLEQGGQCMYTGRTINLSNLFDPNAFDIEHTIPESLSFDSSDMNLTLCDAHYNRFIKKNHIPTDMPNYDKAITIDGKEYPAITSQLQRWVERVERLNRNVEYWKGQARRAQNKDRKDQCMREMHLWKMELEYWKKKLERFTVTEVTDGFKNSQLVDTRVITRHAVLYLKSIFPHVDVQRGDVTAKFRKILGIQSVDEKKDRSLHSHHAIDATTLTIIPVSAKRDRMLELFAKIEEINKMLSFSGSEDRTGLIQELEGLKNKLQMEVKVCRIGHNVSEIGTFINDNIIVNHHIKNQALTPVRRRLRKKGYIVGGVDNPRWQTGDALRGEIHKASYYGAITQFAKDDEGKVLMKEGRPQVNPTIKFVIRRELKYKKSAADSGFASWDDLGKAIVDKELFALMKGQFPAETSFKDACEQGIYMIKKGKNGMPDIKLHHIRHVRCEAPQSGLKIKEQTYKSEKEYKRYFYAAVGDLYAMCCYTNGKIREFRIYSLYDVSCHRKSDIEDIPEFITDKKGNRLMLDYKLRTGDMILLYKDNPAELYDLDNVNLSRRLYKINRFESQSNLVLMTHHLSTSKERGRSLGKTVDYQNLPESIRSSVKSLNFLIMGENRDFVIKNGKIIFNHR

SEQ ID NO: 622 - protein, 241 aa, Prevotella sp.
QAVKEKIKEAIAGKNFKTAIAEPIFMNKEKGIRINKVRYYVKAQERLKIRQQRDLSSKEYKQFFCVENESNYLLAIYEGELKGKKERDFCVVNNLDSAACLKRSNKGKAAPLVPERSEERNLPLLAVLKRGTQVLFYENSPEEILFDNPQDLVRRLYKVTGINTKKDVKNGKTYLYGNIELRFHQNAQKKDDVKMQSGVYKNNEVLRQGIVLSHKQFKALVEGVDFEFNVLGEIKKKERHA

SEQ ID NO: 623 - protein, 1216 aa, Prevotella stercorea
MTKILGIDTGTNSLGWAIVDKTADNYNLLDKGVNIFQEGVKIEKGIESSKAAERTEHRATRVRYYRIKLRKIRLLRILSDNHLCPPLSQEELSTWRLKKVYPKNELFMQWQRTDDDTEKTPYAYRHKCIHEKLDLSDVTDRYILGRAFYHIIQRRGFLSNRKEQGGEDSGKVKEGISTLTHEMNEAGYEYLGDYFYALYNKGEKIRKHYTARNEHFLSEFKAICEKQDLEKELGSEVVRNIEKAIFDQRPLKSQKGQVGKCVFEKNKTKCPSSHPMYEEFRMLTFINNIKIKTPNDDVLRPLNTGEREKIMPLFFRKSKKQFDFEDITKKLAPKKMYGFYKKEEDAEMPFLFNYPMDTSVSGCPVTAALKDVFGDDWITAICETYTLGEGKSRFDIVNDIWHALYFYSDKDKLAEFAINRLQLSEDEAKIFSEISLPADYASLSLKAICKILPYLRRGLIYSHAVFLGNLCEVMPKYEWSIKEMRETIIDNIIMEMDKCDTKDKRTFEVCIKDYLKGQYNVSDNSLKKLYHPSMIETYPRVQYTNEHGVYQLGSPRIDSVRNPMAMRSMFRLRKLVNRLLVEGKIDQNTEVHIEFARELNDANKRNAIALFVKENQSANDEARKQIITLFKKETGTDIEPTDKDILKYVLWEEQNHICLYTGKQIRISDFIGANPKFDIEHTIPRSVGGDSTKMNLTLCDSRFNREVKKTKLPVELPNHDEIMERIKEWKKNYELLDIQIRKNKKLSKGATTKEQKDTIIRKRHLLELRRDYWRGKYERFTMESVPEGFSRRQGTDISVISKYARLYLKSLFNRVYTVKGIATSDFRKIWGIQDIYSKKERINHVHHCIDAIVIACIGLDEYNKLGAYYHDEENNKWYGMSKASFKKPWATFVEDIKKIQDEILVYHYTPDNMPKQGRRRIKIDGKKILCKGDAARGSLHNDTYYGAIENDGAVKYVKRIDLASLEEKDVKNIVDDTVRSIIEAAIKEKGFKDAMASTIWMNEEKRVPIKKVRCFTPSITKPLNIRKQRDVSIKEYKQQYHVANDSNYLLALYIGTDNKGKEKREFEIVNILQAAQYYRTSNDKEVVDRHIVPIKSEHDYPFAYTLKIGTMVLLYEKSPNEVWDATIKERNRRLYKVTGLSTMRMKGRNGEYAYATVKLIHNEEARPSKDIKAKNGEYEQGEEFRPAIIMLHTQLNALVQGYDFEINELGEIRRLR

SEQ ID NO: 624 - protein, 1487 aa, Prevotella timonensis; identical to SEQ ID NO: 135

SEQ ID NO: 625 - protein, 770 aa, Pseudoramibacter alactolyticus
MAKGYFASDEEIDFSGVDDGFKNTLSSHQKFKEIFDVEVLNDWQKSMSEKIIFWATVYGDSKKFLKERLEDAYGNELDQKQIKRILGLRFKDWGRLSEAFLNLEGKNSKTNQSQTIIEALWNGDGTNNFNLMELLSSQFTYRDTLKKRALKGEKTLTNITYEDLSDLYLSPSVRRMVWQTILIVKELRQVLGAGPAKIFIEMARDVTLKAGTRTTSRRQQLLDLYKNVQTESRNWVEEIETQEESRFRSKKIFLYYTQMGQCMYTGEPIVFKDLFNRNLYDIDHIYPRHFVKDDSLINNLVLVKKQANSHKSDTFPIENSIQQARRDFWKWLSEKGLISREKFNRLTRRTSFSDEELAGFISRQIVETRQGTKAVAQIFENALPDSEVVYVKAGNVSDFRHHFNLLKCREINDLHHAQDAYLNVVVGNVYHTKFTKNPINFIKGYRKDRKAYAYHMDQIFDHPVKRNDIIAWQTDKNQSIATVKKVMAKGTPLVTRMSYEEHGELSNQNICSAKAAQKAEGKGYLPIKNSERLSNTQRYGGYNKYAGSYFFLVEHTLKKNRVRTIETMPLFLRDTIKTSKDLLKYCCESLKLEAPSIRVMKIKMGSLLSVNGAFVYLTGRSGKKLITPNGFQLILPQKWQDYIRLLIKTKDSPDDVEGISGGKNIEFYDILVEKHTKTCLKNRPNPIGEKLREWRNDFIALDNQKQSDILLEILKLTTFDNSGADLRAIGGKNQSGVSTIGKKISSQKSVVLVHRSVTGIFEKQVDLLSI

SEQ ID NO: 626 - protein, 103 aa, Rhizobium etli
MSGEQLTREIGRSGVKASAVGLGTWAIGGWMWGGTDEAQSIAAIQASLDAGVTLIDTAPAYGLGRSEEIVGKALAGRRDKAVIATKCGLVWHTQKGNHFFDQD

SEQ ID NO: 627 - protein, 1059 aa, Rhodovulum sp.
MGIRFAFDLGTNSIGWAVWRTGPGVFGEDTAASLDGSGVLIFKDGRNPKDGQSLATMRRVPRQSRKRRDRFVLRRRDLLAALRKAGLFPVDVEEGRRLAATDPYHLRAKALDESLTPHEMGRVIFHLNQRRGFRSNRKADRQDREKGKIAEGSKRLAETLAATNCRTLGEFLWSRHRGTPRTRSPTRIRMEGEGAKALYAFYPTREMVRAEFERLWTAQSRFAPDLLTPERHEEIAGILFRQRDLAPPKIGCCTFEPSERRLPRALPSVEARGIYERLAHLRITTGPVSDRGLTRPERDVLASALLAGKSLTFKAVRKTLKILPHALVNFEEAGEKGLDGALTAKLLSKPDHYGAAWHGLSFAEKDTFVGKLLDEADEERLIRRLVTENRLSEDAARRCASIPLADGYGRLGRTANTEILAALVEETDETGTVVTYAEAVRRAGERTGRNWHHSDERDGVILDRLPYYGEILQRHVVPGSGEPEEKNEAARWGRLANPTVHIGLNQLRKVVNRLIAAHGRPDQIVVELARELKLNREQKERLDRENRKNREENERRTAILAEHGQRDTAENKIRLRLFEEQARANAGIALCPYTGRAIGIAELFTSEVEIDHILPVSLTLDDSLANRVLCRREANREKRRQTPFQAFGATPAWNDIVARAAKLPPNKRWRFDPAALERFEREGGFLGRQLNETKYLSRLAKIYLGKICDPDRVYVTPGTLTGLLRARWGLNSILSDSNFKNRSDHRHHAVDAVVIGVLTRGMIQRIAHDAARAEDQDLDRVFRDVPVPFEDFRDHVRERVSTITVAVKPEHGKGGALHEDTSYGLVPDTDPNAALGNLVVRKPIRSLTAGEVDRVRDRALRARLGALAAPFRDESGRVRDAKGLAQALEAFGAENGIRRVRILKPDASVVTIADRRTGVPYRAVAPGENHHVDIVQMRDGSWRGFAASVFEVNRPGWRPEWEVKKLGGKLVMRLHKGDMVELSDKDGQRRVKVVQQIEISANRVRLSPHNDGGKLQDRHADADDPFRWDLATIPLLKDRGCVAVRVDPIGVVTLRRSNV

SEQ ID NO: 628 - protein, 1405 aa, Riemerella anatipestifer
MKTILGLDLGTNSIGWALVKEAENSNEKSEIIKLGVRVNPLTVDEKTNFEAGRPLSTNADRTAKRSARRNLQRYKLRRKNLIDLLIKNQLIDKDTPLTEIGKNTTHQTLELRAKAARERIELEDLARVFLAINKKRGYRSSRKVNNEEEGQAVDGMAVAKKLYDENLTPGQYAYELLSKGKKYVPDFYRSDLQAEFNAIWEYQKQFYADILDDELYNALKGQGQQNSRKRFLAIKGVYTAENKGKRDDVKLRHYKWRSEAISKKINIEEVAYVLVEINNDLNKSSGYLGAISDRSKELYFNKETVGENLWKQIQKNPHTSLKNQVFYRQDYLDEFEQIWETQAQFHPQLTLALKEQIRDVIIFYQRKLKSQKGLLSFCQFESWEIERKDENGNVILNKTTQLPKRQTVGRRVAPKSSPLFQEFKIWQNINNLEVTKISEGASKNKKETETLSDDERKLLFEELNLRGNLSQKEVLQILGLKDKEYKTNFSEGLEGNRTNAALFNIYQQIAENEGYGFDWSKKSAQEIKEELKAVFPQIGIQADILDFNANLDGKEFENQASYQLWHLLYSAEEDDKINEEDQIIYGNSAVSLKKKLCEKFGFTPEYAKWIANVSLQDDYGNLSTKAMRKIIPYLIDGNDYSEACALAGYNHSNSLTKEENDNRELLDKLELLPKNSLRNPVVEKILNQMVNVVNQVIETYGKPDEVRIELARELKKSAEKRAEMTKSINEATRRNEDIKKLITKDFGIPNPTKSDVVRYRLWEELAPLAYKDVFTGKQIKKEDLFSSKIDIEHIIPKALLFDDSFSNKTLVFRETNLKKADRTAYDFIESDYNATLDDYIQRVETLYNNTKGTISKGKRNKLLMAQKNLPDGFIERDLRNSQYIAKKAKAMLYQVFKDVNVTSGSITDRLREDWDLINVMKELNFPKYKALGLTEIEERYDIGQEKTKRVEVITDWTKRNDHRHHAMNALTVAFTTSSHIQYLNYLNARKNESHKEHKNIKGIENKITHKQKDKRKFIPPMPNFREEAKKHIETILVSIKNKNKVYTKNINKTKKKSGHNTKEQLTPRGQLHKETVYGKSKRPMSKPTKINKNFSLEQAQLIINVQEKELVLRHLAQFDNNPAVAFDTKTLKKMPLLKNGEPLKEVLCFEEIFTIRKDITPDLKIEKVVDEKIKAILEQRKKDFGGNAKEAFSDLDKNPIWLNKKKGICIKRVTITGVSNAEALHHQKDHLGREILDDNGNPIPADFVSTGNNHHLAVYLDSEGKLQDNIVSFYEAVVRTSQGLPVVDKGLNKDLGWKFLFSLKQNEMFVFPNDDFDINDFDLLDDKKAELISKHLYRVQKISKVSAGNSFVRDIVFRHHLETTVKEVKELKDISYIQLKSLEGLRNIKKVRINHIGKIVQVGEY

SEQ ID NO: 629 - protein, 1145 aa, Riemerella anatipestifer
MKTILGLDLGTNSIGWALVKETENSNEKSEIIKLGVRVNPLTVDEKTNFEAGRPLSTNADRTAKRSARRNLQRYKLRRKNLIDLLIKHRLIDKDTPLTEIGKNTTHQTLELRAKAARERIELEDLARVFLAINKKRGYRSSRKVNNEEEGQVVDGMAVAKKLYDENLTPGQYAYELLSKGKKYVPDFYRSDLQAEFDSIWEYQKQFYADILDDELYNALKGQGQQNSRKRFLAIKGVYTAENKGKRDEVKLQHYKWRSEAITQKLSIEEVAYVLVEINNDLNKSSGYLGAISDRSKELYFNKETVGENLWKQIQKNPHTSLKNQVFYRQDYLDEFEQIWETQAQFHPQLTLALKEQIRDVVIFYQRKLKSQKGLLSFCQFESWEIERKDENGNVILNKTTQLPKRQTVGRRVAPKSSPLFQEFKIWQNINNLEIAKISDGNSKNKKETEALSDDERKLLFEELNLRGNLSQKEVLQILGLKDKEYKTNFPEGLEGNRTNAALFNIYQQIAENEGYGDWTKKSAQEIKEELKAVFPQIGIQADILDFNAELDGKEFENQASYQLWHLLYSAEEDDKINEEDQIIYGNSAVSLKKKLCEKFGFTPEYAKWIANVSLQDDYGNLSTKAMRKIIPYLIDGNDYSEACALAGYNHSNSLTKEENDNRERLNKLELLPKNSLRNPVVEKILNQMVNVVNQVIETYGKPDEVRIELARELKKSAEERAEMTKGINEATRRNEDIKKLITKNFGIPNPTKNDVVRYRLWEELAPLAYKDVFTGRQIKKEDLFSSKIDIEHIIPKALLFDDSFSNKTLAFRETNLKKADRTAYGFIESDYNATLDDYIQRVETLYNNAKGTISKGKRNKLLMAQKNLPDGFIERDLRNSQYIAKKAKSMIEKVFNDVNVTSGSITDRLREDWDLINVMKELNFPKYKALGLTEIEERYDIGQEKTKKVEVITDWTKRNDHRHHAMDALTVAFTTKSHVQYLNNLNTIHSLKGDEVDLELSKLYGLKNTITEVVNKKRKFIPPMPNFREEAKKHIETILVSIKNKNKVYTKNINKTKKESGYHTKEQLTPRGQLHKETVYGKSKRPMNKPTKINKNFSLEQAQLIINVQEKELVLRHLAQFDNNPAVAFDTKTLKKCHYLKMVNL

SEQ ID NO: 630 - protein, 1400 aa, Riemerella anatipestifer
MKTILGLDLGTNSIGWALVKETENSNEKSEIIKLGVRVNPLTVDEKTNFEAGRPLSTNADRTAKRSARRNLQRYKLRRKNLIDLLIKHRLIDKDTPLTEIGKNTTHQTLELRAKAARERIELEDLARVFLAINKKRGYRSSRKVNNEEEGQVVDGMAVAKKLYDENLTPGQYAYELLSKGKKYVPDFYRSDLQAEFDSIWEYQKQFYADILDDELYNALKGQGQQNSRKRFLAIKGVYTAENKGKRDEVKLQHYKWRSEAITQKLSIEEVAYVLVEINNDLNKSSGYLGAISDRSKELYFNKETVGENLWKQIQKNPHTSLKNQVFYRQDYLDEFEQIWETQAQFHPQLTLALKEQIRDVVIFYQRKLKSQKGLLSFCQFESWEIERKDENGNVILNKTTQLPKRQTVGRRVAPKSSPLFQEFKIWQNINNLEIAKISDGNSKNKKETEALSDDERKLLFEELNLRGNLSQKEVLQILGLKDKEYKTNFPEGLEGNRTNAALFNIYQQIAENEGYGDWTKKSAQEIKEELKAVFPQIGIQADILDFNAELDGKEFENQASYQLWHLLYSAEEDDKINEEDQIIYGNSAVSLKKKLCEKFGFTPEYAKWIANVSLQDDYGNLSTKAMRKIIPYLIDGNDYSEACALAGYNHSNSLTKEENDNRERLNKLELLPKNSLRNPVVEKILNQMVNVVNQVIETYGKPDEVRIELARELKKSAEERAEMTKGINEATRRNEDIKKLITKNFGIPNPTKNDVVRYRLWEELAPLAYKDVFTGRQIKKEDLFSSKIDIEHIIPKALLFDDSFSNKTLAFRETNLKKADRTAYGFIESDYNATLDDYIQRVETLYNNAKGTISKGKRNKLLMAQKNLPDGFIERDLRNSQYIAKKAKSMIEKVFNDVNVTSGSITDRLREDWDLINVMKELNFPKYKALGLTEIEERYDIGQEKTKKVEVITDWTKRNDHRHHAMDALTVAFTTKSHVQYLNNLNTIHSLKGDEVDLELSKLYGLKNTITEVVNKKRKFIPPMPNFREEAKKHIETILVSIKNKNKVYTKNINKTKKESGYHTKEQLTPRGQLHKETVYGKSKRPMNKPTKINKNFSLEQAQLIINVQEKELVLRHLAQFDNNPAVAFDTKTLKKMPLLKNGEPLKEVLCFEEIFTIRKDITPDLKIEKVVDEKIKAILEQRKKDFGGNAKEAFSDLDKNPIWLNKEKGICIKRVTITGVSNAEALHHQKDHLGREILDDNGNPIPADFVSTGNNHHVAIYEDEKGKLQEKVVSLYEAVARANQGLPVVDKGLNEDLGWKFLFTMKQNEMFVFPNDDFDVNDIDLLDENNAKIISQHLFRVQKLATKNYMFRHHLETNVQEVKELNDIAYKSIRSTEPLKNIKKVRINHIGKIVQVGEY

SEQ ID NO: 631 - protein, 1128 aa, Roseburia intestinalis
MDEKMDYRIGLDIGIASVGWAVLQNNSDDEPVRIVDLGVRIFDTAEIPKTGESLAGPRRAARTTRRRLRRRKHRLDRIKWLFENQGLINIDDFLKRYNMAGLPDVYQLRYEALDRKLTDEELAQVLLHIAKHRGFRSTRKAETAAKENGAVLKATDENQKRMQEKGYRTVGEMIYLDEAFRIGCSWSEKGYILTPRNKAENYQHTMLRAMLVEEVKEIFSSQRRLGNKKATEELEEKYLEIMTSQRSFDLGPGMQPDGKPSPYAMEGFSDRVGKCTFLGDQGELRGAKGTYTAEYFVALQKINHTKLVNQDGETRNFTEEERRALTLLLFTQKEVKYAAVRKKLGLPEDILFYNLNYKKAATKEEQQKENQNTEKAKFIGMPYYHDYKKCLEERVKYLTENEVRDLFDEIGMILTCYKNDDSRTERLAKLGLVPIEMEGLLAYTPTKFQHLSMKAMRNIIPFLEKGMTYDKACEEAGYDFKADSKGTKQKLLTGENVNQTINEITNPVVKRSVSQTVKVINAIIRTYGSPQAINIELAREMSKTFEERRKIKGDMEKRQKNNEDVKKQIQELGKLSPTGQDILKYRLWQEQQGICMYSGKTIPLEELFKPGYDIDHILPYSITFDDSFRNKVLVTSQENRQKGNRTPYEYMGNDEQRWNEFETRVKTTIRDYKKQQKLLKKHFSEEERSEFKERNLTDTKYITTVIYNMIRQNLEMAPLNRPEKKKQVRAVNGAITAYLRKRWGLPQKNRETDTHHAMDAVVIACCTDGMIQKISRYTKVRERCYSKGTEFVDAETGEIFRPEDYSRAEWDEIFGVHIPKPWETFRAELDVRMGDDPKGFLDTHSDVALELDYPEYIYENLRPIFVSRMPNHKVTGAAHADTIRSPRHFKDEGIVLTKTALTDLKLDKDGEIDGYYNPQSDLLLYEALKKQLLLYGNDAKKAFAQDFHKPKADGTEGPVVRKVKIQKKQTMGVFVDSGNGIAENGGMVRIDVFRVNGKYYFVPVYTADVVKKVLPNRASTANKPYSEWRTMEDKDFLFSLYSRDLVHIKSKKGIPIKNVDGSLGESKEVYAYYIGADISGAKIEGKAHDSRYTFRGIGVQKLELIEKCQVDILGHISTVKNEKRMGFS

SEQ ID NO: 632 - protein, 1471 aa, Scardovia wiggsiae
MGYKAPRNDKGEIDYGVGLDLGNGSVGWVAMDKDYHLIRARGHELIGARLFDPANSAENRRESRTTRRRLSRRRWRLRMLDSLFASELAKIDPNFLARRKYSWVHPKDEQNHENWYGSIIFGSKEQDKQFYKDYPTIYHLRKKLTEDTERHDIREIYVAIHHIVKYRGHFLREGEINSENLFDPEGFVELIKDVIKLNNSYDESTPIFEASPADVSEALLNEHTSRSGRIEDTLDKLDFSVSRVDKHELKGMRDAAKAVIGAIVGNTADFSKIFNLDNLDKDSKDNLKLKFADSNFDEKYGGVVGSGLLDETQIELVDRIHAVYDAVALKGILGDAHTISEAKVESYEKHRKNWKLIKEELRTKENKDEVDLWYGDLSGRQYKNPPDPEKGPDEGSKKDSPIRDSDQKQNLIKKANDYFTELIDDSQLSEEQKNCLKNDINNGQLFPVQRSSDNGVIPYQIHLNELRRIIENQKQYYPFLAETFIRKTAEGKSYEENKIVALLKFRVPYYVGPLVSKEDMEEHSSGNSAYHWMARNPGRGEAITPWNFDEVVDKDESGARFISRLTGTDTYLLGEPTLPQHSLLYEEYMVLSELNNVRLNVRQGNHWSDKNRQRLSYKQKEFLIENLFKEHKTVTRKRAEDCLSSMGCGEVQLFGLSDEKKFASSLSSYITLKKILGKAFVDDSGNSAILERIIEVQTVFEDREPLTHQLSLIDSLTVEQRKQLAKIHYTGWGKLSRKLLTSKKGSYKIHSQNEIMRTQHSIIDIMRGDSLNLIEIIRDKKIGIGEWIDNENLDRETGESDVSRLESVFEGIVMSPRVKRGVVQAVRVIDDLAKAIGNPPQRIFIEMADEVQASQRTVSRLSRLKALYGSPSLQKEFNDLKDLRKSLNETKDADLQEDRLYLYYIQLGKDLYTGKEISIDSLSSAYDIDHIVPQALTQDDSIDNRVLVSRKENARKTDSYLYTPDLIKNMRPLWGKLLAAGLMSQKKYDALTRVDDFKDREKQRFVQRSLVETRQIMKNVSTILRTYYGEDTNVVTLKSSITHDMRKYLGFPYKNRDINDYHHAQDALCISAAGQFMLNRHFVSGGEVTDGASNAYNMYLAEYLQEFRDAKARGERKRSTAFGFVVGSMSSKDDEKRTDHRTGEIVWSETNAEYLRKVMNYKKMLITQKVGDVKTRALYDETRYGHKESSAKSIKFDNLRRDTSLYGGFSGASTAYMMLVEYKKKNKLVSITAQEASLLAVADQKNDTVSVMDGILASHGLSGAKILLPKIVTGQLLDYSDALVTLQSASELNTARQMWLPRNDYNDIDIILKSKDIEDAAHKLGYDSDTVHVLRRIQKLFEAVFRVAESQFPLHQLSKDQQEEILRDPQNYGFGSAVKLLGGLLKALHANAENTNLAGLVKVLHGDKEYSDDGKAKEFKKFGFSPRWRRISNPTGFTLSDSDTFIYQSPSGIFEQRVTVKELKEKADKQK

SEQ ID NO: 633 - protein, 116 aa, Sphingobacterium spiritivorum
MFRKYFEEKNSARLLFTLKQGDFVYVPDDNEEVILDESSPLFIDYWKNISERSNNIHVVQKFSGKEIYFLKHTIADTIAKKIEFGSQDCYQSLNGKSIKEFCIKIDSDRLGNISKV

SEQ ID NO: 634 - protein, 1306 aa, Sphingobacterium spiritivorum; identical to SEQ ID NO: 98

SEQ ID NO: 635 - protein, 1110 aa, Sphingobium sp.
MAEGKKRIWRLGADLGANSLGWAAIELSAPVNGKPIAILAAGSRIFSDGRDPKSGASLAVDRRDARAMRRRRDRFKQRQKALIKYLIADGLFPADEAARNAMAAIDPYAVRARALDEALSLPELGRALFHLNQRRGFKSNRKADRKADDDAGKIAIGIDRTRDAIAEDEADAGAEPGSWTFGKWLHERRLKGQSVRTRLRPESGEDAKGDGYDFYPDRALMEEEFDAIWAAQAPHHPDVLTNDVHDRLHEIIFYQRPLKAPQVGMCSLIPGDRRLPKAHPLFQRRRLLEELNALMIVRPGEVAQRLTREERDILLLKLKDKNKVSFATLRKALKLDPDARFNKESEDRTDLKGDEVAAVMGSKTRFGNLWVHLSIEAQWDVLARLDAVESDAEDAAFCAWLVETYALTPEQARAVANAPLPPGYGRFGETATRKLIEALRDGKKDDRVLVYSEAVTEAGLGHHSDRRTGEVFEDAKGRPQLPYYGVALERHIMPGTGDPSDPEEMRVGRLTNPTVHIGLNQLRRILNVLIRAYGPPAEIAIELARELKLTDEDKKRINRENNDNRIAAERRSEKLLAIGQADSGANRALLKLWEELNPANVLDRRCIYSGRQISIDMLFSAAVEVDHILPFAATLDDSNGNKIVCLREANREKRKRSPHDAWGHSARWDEIAARAAQLPRNKRWRFEPDAMDKFRDEGGFQARHLVDTQYLARLSREYLATLYPEKGEGSGHIWVSPGRLTEMVRRKLGLNDLLPDHNFGGGADQAKNRLDHRHHAIDAVVVAIVDRGMLNAIARASGQEGAEGRERIIIPEPWDGFRDALRETVNRITVSHRTDHGTASKAGLPKGKDATAGRLHNDTAYGFTGDTDAKGNSIVVRRVPLSSFKKLADLDRIRDADLKAALYQHLNGLEGKAFEKALAEFHKLEWHNFGGVRRVRVTEPLTVIPIKDRNGRIYKGYKGDSNYRYDVWELPDGKWVTNWKNEAGEAMSSVISMFDAHQSSEPPRPHPAARKILSLHQNDLLAIEREGEDRKLMRVVKFGQSGQITLAEHQQAGDLKKRDAVSNDDDPFKYFAPTSGGLKKVKARQVRIDEIGRVLDPGFPARTARRKTRG

SEQ ID NO: 636 - protein, 1084 aa, Sporolactobacillus vineae
MKYSIGLDIGISSVGWSVINLDRERIELMGARLFDAAENPKNGSSLAAPRRDARSARRRLRRRRYRVGRVRHFIIDRGLVTRGQADQLFDWKDGDLDIWLVRVNALERLLTDREFARVLIHIAKNRGYRSNRKSEAKSGENGQVLSAIKANKELMEEKGYQTVAEMLVNEPETFAGRKRNRGGEYTHVIARSELEHEIRLIFTKQRAFGNRFATEENENTYVKIWAAQRPVATKDDILKKIGDCTFEKGEKRAPKASYAFQYFRALDKLNRLRILSVREPSRNLTDDERNLIVPALFNHDKQKYSDLRKILQLRDDQKFNELFYDPGKSLKENENKTFLSLAEQYKIRKVIRDVQGKDGLLQYRPLDIDTIAYALTVFKDDQDTRDYLSNTFVNGNGKQVLNLANRAFDAELIDGLLSLSFAKFGHLSLKALHKLIPHMEQGLSYYDACKKVGYHDNEQVGKSKQHLLPVIPADEIRNPVVVRSLSQTRKVINAIIKRYGSPTFMYIELAREMGRPYNERRDLEKQYNKNRTVNDSAIEQIHELYPEIGAPRGHDILKYKLWQQQDCKCAYSLEKIPAEKIFEPGYAEVDHIIPYSRSFDDSNSNKVLVLSRMNQEKKNRTPYEWFGGDEHRWNKFESYVNALKVNRKKKSLLTKKNMDTEEEDTFKSRHLNDTRYITRFIKSFVEDNLLFREIEGAKQHVFTVNGAYTSLMRKRWGFNKNREESDLHHSVDAVIIAVSQPFRNEVSRYFKHREISLPQLLKRTWDYFPEPWEGFVKELRARTLQDPEKLKLALESLDLDSYDPEFIDEVKPIFISRMPKRSIKGQIHDETLRRNRGKTKDGFVKIVTRTRLENIKFDKNGDFPMYGRESDPKTYQAIKQRYLENNKDKKKAFIEPLYKPAKNPNNASLIRSVKIEDKANQIVPLRDEAVAYNASIVRTEVYRNKETGKFYLAPVYVSDVFAGREPRRFIRANVPYEQWVNITDKFTFLFNLYPNDVIYIKMKKVKTTKSNINKTISWQESYFYFKGTDIHTGAITIIDHMNSFTDRVGTQGLQLFEKYQVDPLGNLSRVHGETQYGVPALSHS

SEQ ID NO: 637 - protein, 475 aa, Staphylococcus massiliensis
MGQDYILGLDIGITSVGYGLIDYHDKSVIDAGVRLFKEANVENNEGRRSKRGSRRLQRRRKHRLARTRNLLESYQLNPFPKCEKNPYEIRVKGFKEVLTSDELSAALLHLAKRRGIDNVHVTDTESDSSDNGLSTKEQLAKNQKALESRYVCELQLERLLNDNKVRGANNRFKTQDFVREAKQILSIQKDHHNLDQVFIDKYISLLETRREYYEGPGKGSPYGWDGDIKKWYELLMGRCTYFPESLRSVKYAYSADLFNALNDLNNLVIVRDENDKLTYPEKYHIVENVFKQRKKPTLKQIAKEIDVAPEDIRGYRVTASGTPVFTSFKLYHDIKSVTSNDKVLEDTELLDAIAEVLTIYQSPIEVQEKLESLNVILTKEEIEGISKLTGYTGTHALSLKAIQIVIDELWETNDNQMTIFTRLNMKPQKVDLAKANKIPTSLVEDFIISPVAKRAFIQSIKVINAVIKNMVCLKI

SEQ ID NO: 638 - protein, 581 aa, Staphylococcus massiliensis
MPKDIIIELAREKNSDEERKIIRDVQKRNQQTRDLVDKVIKETGKTKAKGMVEKLILHDKQEGKCLYSLKSIPLEDLLNNPHHYEVDHIIPRSVSYDNSMNNKVLVLQEENSKKSNQTPFQYFNSSNTHITFKQFKQHVLNLSKTKDRITKKKKEYLLEERDINKFSVQKEFINRNLVDTRYATRELMTLLRAYFSANELDVKVKAINGGFTSYLRKRWDFKKDRNAGYKHHAEDALIIANVDFIFKQLKALDNAKKVMEGRKVQVEKDNVEDNEHYESLFREPDQIKEIKLYDNYKFSHRVDKKPNRELINDTIYSTRKVDNKTYTIQTVNNIYDKQNDQLKKLFNKSPEKFLMYKHDPKTFDKLATIMRQYKNEKNPLYKFHDETGEYLTKYAKKDNGPIVKSLKYIGKQVNAHLDITNDYENSNNKVVKLSLKPFRFDVYLDDGKYKFVTVKYLDIIKKDTYYVIDEEKYKLALQQKKISENAKFIGSFYNNDLIKINGELLRVIGVNDDAKNTLELNMIDISYRDYVENMNLATTPRIRKNIGKSITILEKYTTDILGNTFKISSPEKPQFIFKVRD

SEQ ID NO: 639 - protein, 1334 aa, Staphylococcus pseudintermedius; identical to SEQ ID NO: 205

SEQ ID NO: 640 - protein, 1112 aa, Staphylococcus simulans; identical to SEQ ID NO: 252

SEQ ID NO: 641 - protein, 773 aa, Streptococcus agalactiae
MNKPYSIGLDIGTNSVGWSIITDDYKVPAKKMRVLGNTDKEYIKKNLIGALLFDGGNTAADRRLKRTARRRYTRRRNRILYLQEIFAEEMSKVDDSFFHRLEDSFLVEEDKRGSKYPIFATLQEEKDYHEKFSTIYHLRKELADKKEKADLRLIYIALAHIIKFRGHFLIEDDSFDVRNTDISKQYQDFLEIFNTTFENNDLLSQNVDVEAILTDKISKSAKKDRILAQYPNQKSTGIFAEFLKLIVGNQADFKKYFNLEDKTPLQFAKDSYDEDLENLLGQIGDEFADLFSAAKKLYDSVLLSGILTVIDLSTKAPLSASMIQRYDEHREDLKQLKQFVKASLPEKYQEIFADSSKDGYAGYIEGKTNQEAFYKYLSKLLTKQEDSENFLEKIKNEDFLRKQRTFDNGSIPHQVHLTELKAIIRRQSEYYPFLKENQDRIEKILTFRIPYYIGPLAREKSDFAWMTRKTDDSIRPWNFEDLVDKEKSAEAFIHRMTNNDFYLPEEKVLPKHSLIYEKFTVYNELTKVRYKNEQGETYFFDSNIKQEIFDGVFKEHRKVSKKKLLDFLAKEYEEFRIVDVIGLDKENKAFNASLGTYHDLEKILDKDFLDNPDNESILEDIVQTLTLFEDREMIKKRLENYKDLFTESQLKKLYRRHYTGWGRLSAKLINGIRDKESQKTILDYLIDDGRSNRNFMQLINDDGLSFKSIISKAQAGSHSDNLKEVVGELAGSPAIKKGILQSLKIVDELVKVMGYEPEQIVVEMARENQTTNQ

SEQ ID NO: 642 - protein, 1370 aa, Streptococcus agalactiae
MNKPYSIGLDIGTNSVGWSIITDDYKVPAKKMRVLGNTDKEYIKKNLIGALLFDGGNTAADRRLKRTARRRYTRRRNRILYLQEIFAEEMSKVDDSFFHRLEDSFLVEEDKRGSKYPIFATMQEEKDYHEKFPTIYHLRKELADKKEKADLRLVYLALAHIIKFRGHFLIEDDRFDVRNTDIQKQYQAFLEIFDTSFENNHLLSQNVDVEAILTDKISKSAKKDRILAQYPNQKSTGIFAEFLKLIVGNQADFKKHFNLEDKTPLQFAKDSYDEDLENLLGQIGDEFADLFSAAKKLYDSVLLSGILTVTDLSTKAPLSASMIQRYDEHREDLKQLKQFVKASLPEKYQEIFADSSKDGYAGYIEGKTNQEAFYKYLSKLLTKQEDSEYFLEKIKNEDFLRKQRTFDNGSIPHQVHLTELKAIIRRQSEYYPFLKENQDKIEKILTFRIPYYVGPLARGNSDFAWMTRKTDDSIRPWNFEDLVDKEKSAEAFIHRMTNNDLYLPEEKVLPKHSLIYEKFTVYNELTKVRYKNEQGETYFFDSNVKQEIFDGVFKEHRKVSKKQLLDFLAKEFEEFRIVDVTGLDKENKAFNASLGTYHDLKKILDKDFLDNPDNESILEDIVQTITLFEDREMIKKRLENYKDLFTESQLKKLYRRHYTGWGRLSAKLINGIRDRESQKTILDYLISDGRANRNFMQLINDDGLSFKSIISKAQSGSHSDNLKEVVGELAGSPAIKKGILQSLKIVDELVKVMGYEPEQIVVEMARENQTTNQGRRNSRQRYKLLEDGVKNLASDLNGDILKEYPTDNQALQNERLFLYYLQNGRDMYTGEALDIDNLSQYDIDHIVPQAFIKDDSIDNRVLVSSAKNRGKSDDVPSIDIVKARKAFWKKLLDAKLISQRKYDNLTKAERGGLTPDDKAGFIQRQLVETRQITKHVARILDERFNNKVDDNNKPIRKVKIVTLKSNLVSNFRKEFGFYKIREVNNYHHAHDAYLNAVVAKAILTKYPQLEPEFVYGDYPKYNSYKTRKSATEKLFFYSNIMNFFKTKVTLADETVVVKDDIEVNNETGEIAWDKKKHFATVRKVLSYPQVNIVKKTEVQTGGFSKESILAHSNSDKLIPRKTKDIYLDPKKYGGFDSPIVAYSVLVLADIKKGKAQKLKTVKELIGITIMERERFEKNPSAFLESKGYLNIRTDKLIILPKYSLFELENGRRRLLASAGELQKGNELALPTQYMKFLYLASRYNESKGKPEEIEKKQEFVNQHVSYFDDILQLINDFSKRVILADANLEKINKLYSDNKDNTPVDELAKNIINLFTFTSLGAPAAFKFFDKSVDRKRYTSTKEVLDSTLIHQSITGLYETRIDLGKLGED

SEQ ID NO: 643 - protein, 1370 aa, Streptococcus agalactiae
MNKPYSIGLDIGTNSVGWSIITDDYKVPAKKMRVLGNTDKEYIKKNLIGALLFDGGNTAADRRLKRTARRRYTRRRNRILYLQEIFAEEMSKVDDSFFHRLEDSFLVEEDKRGSKYPIFATMQEEKDYHEKFPTIYHLRKELADKKEKADLRLVYLALAHIIKFRGHFLIEDDRFDVRNTDIQKQYQAFLEIFDTSFENNHLLSQNVDVEAILTDKISKSAKKDRILAQYPNQKSTGIFAEFLKLIVGNQADFKKHFNLEDKTPLQFAKDSYDEDLENLLGQIGDEFADLFSAAKKLYDSVLLSGILTVTDLSTKAPLSAYMIQRYDEHREDLKQLKQFVKASLPEKYQEIFADSSKDGYAGYIEGKTNQEAFYKYLSKLLTKQEDSEYFLEKIKNEDFLRKQRTFDNGSIPHQVHLTELKAIIRRQSEYYPFLKENQDKIEKILTFRIPYYVGPLARGNSDFAWMTRKTDDSIRPWNFEDLVDKEKSAEAFIHRMTNNDLYLPEEKVLPKHSLIYEKFTVYNELTKVRYKNEQGETYFFDSNVKQEIFDGVFKEHRKVSKKQLLDFLAKEFEEFRIVDVTGLDKENKAFNASLGTYHDLKKILDKDFLDNPDNESILEDIVQTITLFEDREMIKKRLENYKDLFTESQLKKLYRRHYTGWGRLSAKLINGIRDRESQKTILDYLISDGRANRNFMQLINDDGLSFKSIISKAQSGSHSDNLKEVVGELAGSPAIKKGILQSLKIVDELVKVMGYEPEQIVVEMARENQTTNQGRRNSRQRYKLLEDGVKNLASDLNGDILKEYPTDNQALQNERLFLYYLQNGRDMYTGEALDIDNLSQYDIDHIVPQAFIKDDSIDNRVLVSSAKNRGKSDDVPSIDIVKARKAFWKKLLDAKLISQRKYDNLTKAERGGLTPDDKAGFIQRQLVETRQITKHVARILDERFNNKVDDNNKPIRKVKIVTLKSNLVSNFRKEFGFYKIREVNNYHHAHDAYLNAVVAKAILTKYPQLEPEFVYGDYPKYNSYKTRKSATEKLFFYSNIMNFFKTKVTLADETVVVKDDIEVNNETGEIAWDKKKHFATVRKVLSYPQVNIVKKTEVQTGGFSKESILAHSNSDKLIPRKTKDIYLDPKKYGGFDSPIVAYSVLVLADIKKGKAQKLKTVKELIGITIMERERFEKNPSAFLESKGYLNIRTDKLIILPKYSLFELENGRRRLLASAGELQKGNELALPTQYMKFLYLASRYNESKGKPEEIEKKQEFVNQHISYFDDILQLINDFSKRVILADANLEKINKLYSDNKDNTPVDELAKNIINLFTFTSLGAPAAFKFFDKSVDRKRYTSTKEVLDSTLIHQSITGLYETRIDLGKLGED

SEQ ID NO: 644 - protein, 1378 aa, Streptococcus agalactiae
MNKPYSIGLDIGTNSVGWSIITDDYKVPAKKMRVLGNTDKEYIKKNLIGALLFDGGNTAADRRLKRTARRRYTRRRNRILYLQEIFAEEMSKVDDSFFHRLEDSFLVEEDKRGSKYPIFATMQEEKYYHEKFPTIYHLRKELADKKEKADLRLIYLALAHIIKFRGHFLIEDDRFDVRNTDIQKQYQAFLEIFDTTFENNDLLSQNVDVEAILTDKISKSAKKDRILARYPNQKSTGIFAEFLKLIVGNQADFKKHFNLEDKTPLQFAKDSYDEDLENLLGQIGDEFADLFSAAKKLYDSVLLSGILTVIDLSTKAPLSASMIQRYDEHHEDLKHLKQFVKASLPENYREVFADSSKDGYAGYIEGKTSQEAFYKYLLKLLTKQEGSEYLLEKIKNEDFLRKQRTFDNGSIPHQVHLTELRAIIRRQSEYYPFLKENLDRIEKILTFRIPYYVGPLAREKSDFAWMTRKTDDSIRPWNFEDLVDKEKSAEAFIHRMTNNDLYLPEEKVLPKHSLIYEKFTVYNELTKVRFLAEGFKDFQFLNRKQKETIFNSLFKEKRKVTEKDIISFLNKVDGYEGIAIKGIEKQFNASLSTYHDLKKILGKDFLDNTDNELILEDIIQTLTLFEDREMIKKRLDIYKDFFTESQLKKLYRRHYTGWGRLSAKLINGIRNKENQKTILDYLIDDGSANRNFMQLIKDAGLSFKPIIDKARTGSHSDNLKEVVGELAGSPAIKKGILQSLKIVDELVKVMGYEPEQIVVEMARENQTTAKGLSRSRQRLTTLRESLGNLKSNILEEKKPKYVKDQVENHHLSDDRLFLYYLQNGKDMYTDDELDIDNLSQYDIDHIIPQAFIKDDSIDNRVLVSSAKNRGKSDDVPSIEIVKARKMFWKNLLDAKLMSQRKYDNLTKAERGGLTSDDKARFIQRQLVETRQITKHVARILDERFNNELDSKGRRIRKVKIVTLKSNLVSNFRKEFGFYKIREVNNYHHAHDAYLNAVVAKAILTKYPQLEPEFVYGLYRRKKLSKIVREDKEEKYSEATRKMFFYSNLMNMFKRVVRLADGSIVVRPVIETGRYMGKTAWDKKKHFATVRKVLSYPQNNIVKKTEIQTGGFSKESILAHGNSDKLIPRKTKDIYLDPKKYGGFDSPIVAYSVLVVADIKKGKAQKLKTVTELLGITIMERSRFEKNTSAFLESKGYLNIRDDKLMILPKYSLFELENGRRRLLASAGELQKGNELALPTQFMKFLYLASRYNESKGKPEEIEKKQEFVNQHVSYFDDILQLINDFSNRVILADANLEKINKLYQDNKENIPVDELANNIINLFTFTSLGAPAAFKFFDKIVDRKRYTSTKEVLNSTLIHQSITGLYETRIDLGKLGEG

SEQ ID NO: 645 - protein, 1370 aa, Streptococcus agalactiae
MNKPYSIGLDIGTNSVGWSIITDDYKVPAKKMRVLGNTDKEYIKKNLIGALLFDGGNTAADRRLKRTARRRYTRRRNRILYLQEIFAEEMSKVDDSFFHRLEDSFLVEEDKRGSKYPIFATMQEEKYYHEKFPTIYHLRKELADKKEKADLRLIYLALAHIIKFRGHFLIEDDRFDVRNTDIQKQYQAFLEIFDTTFENNDLLSQNVDVEAILTDKISKSAKKDRILARYPNQKSTGIFAEFLKLIVGNQADFKKHFNLEDKTPLQFAKDSYDEDLENLLGQIGDEFADLFSAAKKLYDSVLLSGILTVTDLSTKAPLSASMIQRYDEHREDLKQLKQFVKASLPEKYQEIFADSSKDGYAGYIEGKTNQEAFYKYLSKLLTKQEGSEYLLEKIKNEDFLRKQRTFDNGSIPHQVHLTELRAIIRRQSEYYPFLKENLDRIEKILTFRIPYYVGPLAREKSDFAWMTRKTDDSIRPWNFEDLVDKEKSAEAFIHRMTNNDLYLPEEKVLPKHSLIYEKFTVYNELTKVRFLAEGFKDFQFLNRKQKETIFNSLFKEKRKVTEKDIISFLNKVDGYEGIAIKGIEKQFNASLSTYHDLKKILGKDFLDNTDNELILEDIVQTLTLFEDREMIRKRLDIYKDFFTESQLKKLYRRHYTGWGRLSAKLINGIRNKENQKTILDYLIDDGSANRNFMQLIKDAGLSFKPIIDKARTGSHSDNLKEVVGELAGSPAIKKGILQSLKIVDELVKVMGYEPEQIVVEMARENQTTAKGLSRLRQRLTTLRESLANLKSNILEEKKPKYVKDQVENHHLSDDRLFLYYLQNGKDMYTDDELDIDNLSQYDIDHIIPQAFIKDDSIDNRVLVSSAKNRGKSDDVPSVEIVKDCKVFWKKLLDAKLMSQRKYDNLTKAERGGLTSDDKARFIQRQLVETRQITKHVARILDERFNNELDSKGRRIRKVKIVTLKSNLVSNFRKEFGFYKIREVNNYHHAHDAYLNAVVAKAILTKYPQLEPEFVYGDYPKYNSYKTRKSATEKLFFYSNIMNFFKTKVTLADGTVVVKDDIEVNNDTGEIVWDKKKHFATVRKVLSYPQVNIVKKTEIQTGGFSKESILAHGNSDKLIPRKTKDIYLDPKKYGGFDSPIVAYSVLVVADIKKGKAQKLKTVTELLGITIMERSRFEKNPSAFLESKGYLNIRDDKLMILPKYSLFELENGRRRLLASADELQKGNELALPTQFMKFLYLASRYNELKGKPEEIEQKQEFVVQHVSYFDDILQIINDFSNRVILADANLEKINKLYQDNKENIPVDELANNIINLFTFTSLGAPAAFKFFDKIVDRKRYTSTKEVLNSTLIHQSITGLYETRIDLGKLGED

SEQ ID NO: 646 - protein, 1377 aa, Streptococcus agalactiae
MNKPYSIGLDIGTNSVGWSIITDDYKVPAKKMRVLGNTDKEYIKKNLIGALLFDGGNTAADRRLKRTARRRYTRRRNRILYLQEIFAEEMSKVDDSFFHRLEDSFLVEEDKRGSKYPIFATMQEEKYYHEKFPTIYHLRKELADKKEKADLRLVYLALAHIIKFRGHFLIEDDRFDVRNTDIQKQYQAFLEIFDTTFENNHLLSQNVDVEAILTDKISKSAKKDRILAQYPNQKSTGIFAEFLKLIVGNQADFKKHFNLEDKTPLQFAKDSYDEDLENLLGQIGDEFADLFSVAKKLYDSVLLSGILTVTDLSTKAPLSASMIQRYDEHHEDLKHLKQFVKASLPENYREVFADSSKDGYAGYIEGKTNQEAFYKYLLKLLTKQEGSEYFLEKIKNEDFLRKQRTFDNGSIPHQVHLTELRAIIRRQSEYYPFLKENQDRIEKILTFRIPYYVGPLAREKSDFAWMTRKTDDSIRPWNFEDLVDKEKSAEAFIHRMTNNDLYLPEEKVLPKHSLIYEKFTVYNELTKVRFLAEGFKDFQFLNRKQKETIFNSLFKEKRKVTEKDIISFLNKVDGYEGIAIKGIEKQFNASLSTYHDLKKILGKDFLDNTDNELILEDIVQTLTLFEDREMIKKCLDIYKDFFTESQLKKLYRRHYTGWGRLSAKLINGIRNKENQKTILDYLIDDGSANRNFMQLINDDDLSFKPIIDKARTGSHSDNLKEVVGELAGSPAIKKGILQSLKIVDELVKVMGYEPEQIVVEMARENQTTAKGLSRSRQRLTTLRESLANLKSNILEEKKPKYVKDQVENHHLSDDRLFLYYLQNGRDMYTKKALDIDNLSQYDIDHIIPQAFIKDDSIDNRVLVSSAKNRGKSDDVPSIEIVKARKMFWKNLLDAKLMSQRKYDNLTKAERGGLTSDDKARFIQRQLVETRQITKHVARILDERFNNEVDNGKKICKVKIVTLKSNLVSNFRKEFGFYKIREVNDYHHAHDAYLNAVVAKAILTKYPQLEPEFVYGMYRQKKLSKIVHEDKEEKYSEATRKMFFYSNLMNMFKRVVRLADGSIVVRPVIETGRYMGKTAWDKKKHFATVRKVLSYPQNNIVKKTEIQTGGFSKESILAHGNSDKLIPRKTKDIYLDPKKYGGFDSPIVAYSVLVVADIKKGKAQKLKTVTELLGITIMERSRFEKNPSAFLESKGYLNIRDDKLMILPKYSLFELENGRRRLLASAGELQKGNELALPTQFMKFLYLASRYNESKGKPEEIEKKQEFVNQHVSYFDDILQLINDFSKRVILADANLEKINKLYQDNKENIPVDELANNIINLFTFTSLGAPAAFKFFDKIVDRKRYTSTKEVLNSTLIHQSITGLYETRIDLGKLGED

SEQ ID NO: 647 - protein, 1370 aa, Streptococcus agalactiae
  misc_feature (117)..(117): Xaa can be any naturally occurring amino acid
MNKPYSIGLDIGTNSVGWSIITDDYKVPAKKMRVLGNTDKEYIKKNLIGALLFDGGNTAADRRLKRTARRRYTRRRNRILYLQEIFAEEMSKVDDSFFHRLEDSFLVEEDKRGSKYXIFATLQEEKDYHEKFSTIYHLRKELADKKEKADLRLIYIALAHIIKFRGHFLIEDDSFDVRNTDISKQYQDFLEIFNTTFENNDLLSQNVDVEAILTDKISKSAKKDRILAQYPNQKSTGIFAEFLKLIVGNQADFKKYFNLEDKTPLQFAKDSYDEDLENLLGQIGDEFADLFSAAKKLYDSVLLSGILTVIDLSTKAPLSASMIQRYDEHREDLKQLKQFVKASLPEKYQEIFADSSKDGYAGYIEGKTNQEAFYKYLSKLLTKQEDSENFLEKIKNEDFLRKQRTFDNGSIPHQVHLTELKAIIRRQSEYYPFLKENQDRIEKILTFRIPYYIGPLAREKSDFAWMTRKTDDSIRPWNFEDLVDKEKSAEAFIHRMTNNDFYLPEEKVLPKHSLIYEKFTVYNELTKVRYKNEQGETYFFDSNIKQEIFDGVFKEHRKVSKKKLLDFLAKEYEEFRIVDVIGLDKENKAFNASLGTYHDLEKILDKDFLDNPDNESILEDIVQTLTLFEDREMIKKRLENYKDLFTESQLKKLYRRHYTGWGRLSAKLINGIRDKESQKTILDYLIDDGRSNRNFMQLINDDGLSFKSIISKAQAGSHSDNLKEVVGELAGSPAIKKGILQSLKIVDELVKVMGYEPEQIVVEMARENQTTNQGRRNSRQRYKLLDDGVKNLASDLNGNILKEYPTDNQALQNERLFLYYLQNGRDMYTGEALDIDNLSQYDIDHIIPQAFIKDDSIDNRVLVSSAKNRGKSDDVPSLEIVKDCKVFWKKLLDAKLMSQRKYDNLTKAERGGLTSDDKARFIQRQLVETRQITKHVARILDERFNNELDSKGRRIRKVKIVTLKSNLVSNFRKEFGFYKIREVNNYHHAHDAYLNAVVAKAILTKYPQLEPEFVYGDYPKYNSYKTRKSATEKLFFYSNIMNFFKTKVTLADGTVVVKDDIEVNNDTGEIVWDKKKHFATVRKVLSYPQNNIVKKTEIQTGGFSKESILAHGNSDKLIPRKTKDIYLDPKKYGGFDSPIVAYSVLVVADIKKGKAQKLKTVTELLGITIMERSRFEKNPSAFLESKGYLNIRADKLIILPKYSLFELENGRRRLLASAGELQKGNELALPTQFMKFLYLASRYNESKGKPEEIEKKQEFVNQHVSYFDDILQLINDFSKRVILADANLEKINKLYQDNKENISVDELANNIINLFTFTSLGAPAAFKFFDKIVDRKRYTSTKEVLNSTLIHQSITGLYETRIDLGKLGED

SEQ ID NO: 648 - protein, 1370 aa, Streptococcus agalactiae
MNKPYSIGLDIGTNSVGYSVVTDDYKVPAKKMRVLGNTDKEYIKKNLIGALLFDGGNTASDRRLKRTARRRYTRRRNRILYLQEIFAEEMSKVDDSFFHRLEDSFLVEDDKRGSKYPIFATMQEEKDYHEKFPTIYHLRKELADKKEKADLRLVYLALAHIIKFRGHFLIEDDSFDVRNTDIQRQYQAFLEIFDTTFENNHLLSQNIDVEGILTDKISKSAKKDRILAQYPNQKSTGIFAEFLKLIVGNQADFKKHFNLEDKTPLQFAKDSYDEDLENLLGQIGDEFADLFSVAKKLYDSVLLSGILTVTDLSTKAPLSASMIQRYDEHREDLKQLKQFVKASLPEKYQEIFTDSSKDGYAGYIEGKTNQGAFYKYLSKLLTKQEGSEYFLEKIKNEDFLRKQRTFDNGSIPHQVHLTELKAIIRRQSEYYPFLKENLDRIEKILTFRIPYYVGPLAREKSDFAWMTRKTDDSIRPWNFEELVDKEASAEAFIHRMTNNDLYLPEEKVLPKHSLIYEKFTVYNELTKVRYKNEQGETYFFDSNIKQEIFDGVFKEHRKVSKKKLLDFLAKEYEEFRIVDVIGLDKENKAFNASLGTYHDLKKILDKDFLDNPDNESILEDIVQTLTLFEDREMIKKRLENYKDLFTESQLKKLYRRHYTGWGRLSAKLINGIRDKESQKTILDYLISDGRANRNFMQLIHDDGLSFKPIIDKAQAGSHSDNLKEVVGELAGSPAIKKGILQSLKIVDELVKVMGYEPEQVVVEMARENQTTNQGRRNTRQRYKLLEEGVKNLASDLNGNILKEYPTDNQALQNERLFLYYLQNGRDMYTGEALDIDNLSQYDIDHIVPQAFIKDDSIDNRVLVSSAKNRGKSDNVPSIDIVKARKAFWKKLLDAKLMSQRKYDNLTKAERGGLTSDDKARFIQRQLVETRQITKHVARILDERFNNELDSKGRRIRKVKIVTLKSNLVSNFRKEFGFYKIREVNDYHHAHDAYLNAVVAKAILTKYPQLEPEFVYGDYPKYNSYKTRKSATEKLFFYSNIMNFFKTKVTLADGTVVVKDDIEVNNDTGEIVWDKKKHFATVRKVLSYPQVNIVKKTEIQTGGFSKESILAHGNSDKLIPRKTKDIYLDPKKYGGFDSPIVAYSVLVVADIKKGKAQKLKTVTELLGITIMERFRFEKNPSAFLESKGYLNIRDDKLMILPKYSLFELENGRRRLLASAGELQKGNELALPTQYMKFLYLASRYNELKGKPEEIEQKQEFVVQHVSYFDDILQIINDFSNRVILADANLEKINKLYQDNKENISVDELANNIINLFTFTSLGAPAAFKFFDKIVDRKRYTSTKEVLNSTLIHQSITGLYETRIDLGKLGED

SEQ ID NO: 649 - protein, 1370 aa, Streptococcus agalactiae
MNKPYSIGLDIGTNSVGYSVVTDDYKVPAKKMRVLGNTDKEYIKKNLIGALLFDGGNTASDRRLKRTARRRYTRRRNRILYLQEIFAEEMSKVDDSFFHRLEDSFLVEDDKRGSKYPIFATMQEEKDYHEKFPTIYHLRKELADKKEKANLRLVYLALAHIIKFRGHFLIEDDSFDVRNTDIQRQYQAFLEIFDTTFENNHLLSQNIDVEGILTDKISKSAKKDRILAQYPNQKSTGIFAEFLKLIVGNQADFKKHFNLEDKTPLQFAKDSYDEDLENLLGQIGDEFADLFSVAKKLYDSVLLSGILTVTDLSTKAPLSASMIQRYDEHREDLKQLKQFVKASLPEKYQEIFTDSSKDGYAGYIEGKTNQGAFYKYLSKLLTKQEGSEYFLEKIKNEDFLRKQRTFDNGSIPHQVHLTELKAIIRRQSEYYPFLKENLDRIEKILTFRIPYYVGPLAREKSDFAWMTRKTDDSIRPWNFEELVDKEASAEAFIHRMTNNDLYLPEEKVLPKHSLIYEKFTVYNELTKVRYKNEQGETYFFDSNIKQEIFDGVFKEHRKVSKKKLLDFLAKEYEEFRIVDVIGLDKENKAFNASLGTYHDLKKILDKDFLDNPDNESILEDIVQTLTLFEDREMIKKRLENYKDLFTESQLKKLYRRHYTGWGRLSAKLINGIRDKESQKTILDYLISDGRANRNFMQLIHDDGLSFKPIIDKAQAGSHSDNLKEVVGELAGSPAIKKGILQSLKIVDELVKVMGYEPEQVVVEMARENQTTNQGRRNTRQRYKLLEEGVKNLASDLNGNILKEYPTDNQALQNERLFLYYLQNGRDMYTGEALDIDNLSQYDIDHIVPQAFIKDDSIDNRVLVSSAKNRGKSDNVPSIDIVKARKAFWKKLLDAKLMSQRKYDNLTKAERGGLTSDDKARFIQRQLVETRQITKHVARILDERFNNELDSKGRRIRKVKIVTLKSNLVSNFRKEFGFYKIREVNDYHHAHDAYLNAVVAKAILTKYPQLEPEFVYGDYPKYNSYKTRKSATEKLFFYSNIMNFFKTKVTLADGTVVVKDDIEVNNDTGEIVWDKKKHFATVRKVLSYPQVNIVKKTEIQTGGFSKESILAHGNSDKLIPRKTKDIYLDPKKYGGFDSPIVAYSVLVVADIKKGKAQKLKTVTELLGITIMERFRFEKNPSAFLESKGYLNIRDDKLMILPKYSLFELENGRRRLLASAGELQKGNELALPTQYMKFLYLASRYNELKGKPEEIEQKQEFVVQHVSYFDDILQIINDFSNRVILADANLEKINKLYQDNKENISVDELANNIINLFTFTSLGAPAAFKFFDKIVDRKRYTSTKEVLNSTLIHQSITGLYETRIDLGKLGED

SEQ ID NO: 650 - protein, 1370 aa, Streptococcus agalactiae
  misc_feature (9)..(9): Xaa can be any naturally occurring amino acid
MNKPYSIGXDIGTNSVGWSIITDDYKVPAKKMRVLGNTDKEYIKKNLIGALLFDGGNTAADRRLKRTARRRYTRRRNRILYLQEIFAEEMSKVDDSFFHRLEDSFLVEEDKRGSKYPIFATLQEEKDYHEKFSTIYHLRKELADKKEKADLRLIYIALAHIIKFRGHFLIEDDSFDVRNTDISKQYQDFLEIFNTTFENNDLLSQNVDVEAILTDKISKSAKKDRILAQYPNQKSTGIFAEFLKLIVGNQADFKKYFNLEDKTPLQFAKDSYDEDLENLLGQIGDEFADLFSAAKKLYDSVLLSGILTVIDLSTKAPLSASMIQRYDEHREDLKQLKQFVKASLPEKYQEIFADSSKDGYAGYIEGKTNQEAFYKYLSKLLTKQEDSENFLEKIKNEDFLRKQRTFDNGSIPHQVHLTELKAIIRRQSEYYPFLKENQDRIEKILTFRIPYYIGPLAREKSDFAWMTRKTDDSIRPWNFEDLVDKEKSAEAFIHRMTNNDFYLPEEKVLPKHSLIYEKFTVYNELTKVRYKNEQGETYFFDSNIKQEIFDGVFKEHRKVSKKKLLDFLAKEYEEFRIVDVIGLDKENKAFNASLGTYHDLEKILDKDFLDNPDNESILEDIVQTLTLFEDREMIKKRLENYKDLFTESQLKKLYRRHYTGWGRLSAKLINGIRDKESQKTILDYLIDDGRSNRNFMQLINDDGLSFKSIISKAQAGSHSDNLKEVVGELAGSPAIKKGILQSLKIVDELVKVMGYEPEQIVVEMARENQTTNQGRRNSRQRYKLLDDGVKNLASDLNGNILKEYPTDNQALQNERLFLYYLQNGRDMYTGEALDIDNLSQYDIDHIIPQAFIKDDSIDNRVLVSSAKNRGKSDDVPSLEIVKDCKVFWKKLLDAKLMSQRKYDNLTKAERGGLTSDDKARFIQRQLVETRQITKHVARILDERFNNELDSKGRRIRKVKIVTLKSNLVSNFRKEFGFYKIREVNNYHHAHDAYLNAVVAKAILTKYPQLEPEFVYGDYPKYNSYKTRKSATEKLFFYSNIMNFFKTKVTLADGTVVVKDDIEVNNDTGEIVWDKKKHFATVRKVLSYPQNNIVKKTEIQTGGFSKESILAHGNSDKLIPRKTKDIYLDPKKYGGFDSPIVAYSVLVVADIKKGKAQKLKTVTELLGITIMERSRFEKNPSAFLESKGYLNIRADKLIILPKYSLFELENGRRRLLASAGELQKGNELALPTQFMKFLYLASRYNESKGKPEEIEKKQEFVNQHVSYFDDILQLINDFSKRVILADANLEKINKLYQDNKENISVDELANNIINLFTFTSLGAPAAFKFFDKIVDRKRYTSTKEVLNSTLIHQSITGLYETRIDLGKLGED

SEQ ID NO: 651 - protein, 1125 aa, Streptococcus anginosus
MNGLVLGLDIGIASVGVGILNKETGEIIHANSRIFPAATADSNVERRGFRQGRRLGRRKKHRSARLNNLFEEFGFITDFSAIPLNLNPYALRVKGLSEELTNEELFIALKNIIKRRGISYLDDASEDGETASNEYGKAVEENRKLLADKTPGQIQLERFEKYGQVRGDFTVVENGENHRLINVFSTSAYKKEAERILRRQQEFNVRISDEFIEAYLTILTGKRKYYHGPGNEKSRTDYGRFRTDGTTLDNIFGILIGKCTFYPDEYRAAKASYTAQEFNLLNDLNNLTVPTETKKLSPEQKRQIVEYARTAKTLGTPTLLKYIAKLVDGSIDDIKGYRIDKSDKPEMHTFDAYRKMRTLDLVNIDALSRETLDDLAHILTLNTESEGILEALNSKMPSTFTKEQIDELIQFRKKNSAVFGKGWHNFSLKLMNELISELYETSEEQMTILTRLGKQRSREISKRTKYIDEKELTEEIYNPVVAKSVRQAIKIINEATKRYGIFDNIVIEMARENNEEDAKKDYIKRQKANQDEKNASMEKAAFQYNGKKELPDSIFHGHKELATKIRLWHQQGERCLYTGKNISIRDLIHNPHQYEIDHILPLSLSFDDGLANKVLVLATANQEKGQRTPFQAIDSMDDAWSYREFKQYVRNSKSLSNKKKDYLLTEEDISKIEVKQKFIERNLVDTRYSSRVVLNTLQEFYKTNDFDTKISVVRGQFTSQLRRKWKIEKSRDTYHHHAVDALIIAASSQLRLWKKQNNPLISYKEGQFVDPETGEILSLTDDEYKELVFRPPYDYFVDTLKSKSFEDSILFSYQVDSKYNRKISDATIYGTRKAQLGKDKQEETYVLGKIKDIYSQKGYEDFIKRYNKDETQFLIYHKDPQTFEKVIEEILKTYPDKELNEKGKEIPCNPFEKYRQENGPIRKYSKKGKGPEIKSLKYYDNKLGNHIDITPVNSQNQVVLQSLKPWRTDVYFNPRTSKYELMGLKYSDLRFEKGSGSYGISPEKYNKVKAKEGVNEDSEFKFTLYKNDLILIKDTETGEQQLFRYGSRNDTSKHYVELKPYEKAKFEGNQQLMNLLGTVAKGGQCLKGINKPNLSIYKVKTDVLGNKYFIKKEGDQPQLNFKKKF

SEQ ID NO: 652 - protein, 1386 aa, Streptococcus anginosus
MNQKYSIGLDIGTNSVGWAVITDDYKVPAKKMKVLGNTDKQSIKKNLLGALLFDSGETAEATRLKRTARRRYTRRRNRLRYLQEIFAEEMMQVDESFFQRLDDSFLVDEDKRGERHPIFGNIAAEVKYHDEFPTIYHLRKHLADISQKADLRLVYLALAHMIKFRGHFLIEGQLKAENTNVQALFKDFVEVYDKTVEESHLSEITVDALSILTEKVSKSRRLENLIAHYPAEKKNTLFGNLIALFLGLQPNFKTNFQLSEDAKLQFSKDTYEEDLEGLLGEVGDEYADLFASAKNLYDAILLSGILTVDDNSTKAPLSASMVKRYEEHQKDLKKFEDFIKVNALDQYNAIFKDKNKKGYAGYIESGVKQDEFYKYLKGILLQINGSGDFLDKIDREDFLRKQRTFDNGSIPHQIHLQEMHAILRRQGEHYPFLKENQDKIEKILTFRIPYYVGPLARKGSRFAWAEYKADEKITPWNFDDILDKEKSAEKFITRMTLNDLYLPEEKVLPKHSLLYETFTVYNELTKVKYVNEQGEAKFFDANMKQEIFDHVFKENRKVTKDKLLNYLNKEFEEFRIVNLTGLDKENKVFNSSLGTYHDLRKILNKSFLDNKENAQIIEDIIQTLTLFEDREMIRQRLQKYSDIFTKAQLKKLERRHYTGWGRLSYKLINGIRNKENKKTILDYLIDDGYANRNFMQLINDDALSFKEEIAKAQIIGDVDDIANVVHDLPGSPAIKKGILQSVKIVDELVKVMGHNPANIIIEMARENQTTDRGRRNSQQRLKLLQDSLKNLDNPVNIKNVENQQLQNDRLFLYYIQNGKDMYTGETLDINNLSQYDIDHIIPQAYIKDDSFDNRVLTSSSENRGKSDNVPSIEVVCARKADWMRLRKAGLISQRKFDNLTKAERGGLTENDKAGFIKRQLVETRQITKHVAQVLDARFNAKHDENKKVIRDVKIITLKSNLVSQFRKDFKFYKVREINDYHHAHDAYLNAVIGTALLKKYPKLASEFVYGEFKKYDVRKFIAKSDKEIGKATAKYFFYSNLMNFFKKEVKFADGTVVERPDIETSEDGEIAWNKQTDFKIVRKVLSYPQVNIVKKTEVQTHGLDRGKPRGLFNANPSPKPKPDSSENLVGVKRNLDPKKYGGYAGISNSYAVLVKAIIEKGVKKKETMVLEFQGISILDRITFEKDKRAFLLGKGYKDIKKIIELPKYSLFELKDGSRRMLASILSTNNKRGEIHKGNELFVPQKFTTLLYHAKRINNPINKDHIEYVKKHRDDFKELLNYVLEFNEKYVGATKNGERLKEAVADFDSKSNEEICTSFLGAVNSKNAGLFELTSLGSASDFEFLGVKIPRYRDYTPSSLLKDSTLIHQSITGLYETRIDLSKLGED

SEQ ID NO: 653 - protein, 1396 aa, Streptococcus anginosus
MTKPYSIGLDIGTNSVGWAVITDDYKVPAKKMKVLGNTNRDYIKKNLLGALLFDGGETAEGRRLKRTARRRYTRRKNRLRYLQEIFAEEMMQVDESFFQRLDDSFLVEEDKQGSKYPIFGTLKEEKEYHKKFKTIYHLREELANSKEKADLRLVYLALAHMIKFRGHFLYEGDLKAENTDVQALFKDFVEEYDKTIEESHLSEITVDALSILTEKVSKSSRLENLIAHYPTEKKNTLFGNLIALSLGLQANFKTNFQLSEDAKLQFSKDTYEEDLEGLLGEVGDEYADLFVSAKNLYDAILLSGILTVDDNSTKAPLSASMVKRYKEHKEELAAFKRFIKEKLPKKYEEIFKDDTKNGYAGYVGADKKLRKRSGKLATEEEFYKYVKGILNKVEGADYFLDKIDREDFLRKQRTFDNGSIPHQIHLQEMHAILRRQGEHYPFLKENQDKIEKILTFRIPYYVGPLARKGSRFAWAEYKADEKITPWNFDDILDKEKSAEKFITRMTLNDLYLPEEKVLPKHSPLYETFTVYNELTKVKYVNEQGEAKFFDTNMKQEIFDHVFKENRKVTKDKLLNYLNKEFEEFRIVNLTGLDKENKAFNASLGTYHDLRKILDKSFLDDKVNEKIIEDIIQTLTLFEDREMIRQRLQKYSDIFTTQQLKELERRHYTGWGRLSYKLINGIRNKENKKTILDYLIDDGYANRNFMQLINDDALSFKEEIARAQIIGDVDDIANVVHDLPGSPAIKKGILQSVKIVDELVKVMGHNPTNIIIEMARENQTTDKGRRNSQQRLKLLQDSLKNLDNPVNIKNVENQQLQNDRLFLYYIQNGKDMYTGETLDINNLSQYDIDHIIPQAFIKDNSLDNRVLTRSDKNRGKSDDVPSIEVVHEMKSFWSKLLSVKLITQRKFDNLTKAERGGLTENDKAGFIKRQLVETRQITKHVAQVLDARFNAKHDENKKVIRDVKIITLKSNLVSQFRKDFKFYKVREINDYHHAHDAYLNAVIGTALLKKYPKLASEFVYGEFKKYDVRKFIAKSDKEIGKATAKYFFYSNLMNFFKKEVKFADGTVVERPDIETSEDGEIAWNKQTDFKIVRKVLSYPQVNIVKKTEVQTHGLDRGKPRGLFNANPSPKPKPDSSENLVGIKRNLDPKKYGGYAGISNSYAVLVKAIIEKGVKKKETMVLEFQGISILDRITFEKDKRAFLLGKGYKDIKKIIELPKYSLFELKDGSRRMLASILSTNNKRGEIHKGNELFVPQKFTTLLYHAKRINNPINKDHIEYVKKHRDDFKELLNYVLEFNEKYVGATKNGERLKEAVADFDSKSNEEICTSFLGAVNSKNAGLFELTSLGSASDFEFLGVKIPRYRDYTPSSLLKDSILIHQSITGLYETRIDLSKLGED

SEQ ID NO: 654 - protein, 1375 aa, Streptococcus canis
MEKKYSIGLDIGTNSVGWAVITDDYKVPSKKFKVLGNTNRKSIKKNLMGALLFDSGETAEATRLKRTARRRYTRRKNRIRYLQEIFANEMAKLDDSFFQRLEESFLVEEDKKNERHPIFGNLADEVAYHRNYPTIYHLRKKLADSPEKADLRLIYLALAHIIKFRGHFLIEGKLNAENSDVAKLFYQLIQTYNQLFEESPLDEIEVDAKGILSARLSKSKRLEKLIAVFPNEKKNGLFGNIIALALGLTPNFKSNFDLTEDAKLQLSKDTYDDDLDELLGQIGDQYADLFSAAKNLSDAILLSDILRSNSEVTKAPLSASMVKRYDEHHQDLALLKTLVRQQFPEKYAEIFKDDTKNGYAGYVGIGIKHRKRTTKLATQEEFYKFIKPILEKMDGAEELLAKLNRDDLLRKQRTFDNGSIPHQIHLKELHAILRRQEEFYPFLKENREKIEKILTFRIPYYVGPLARGNSRFAWLTRKSEEAITPWNFEEVVDKGASAQSFIERMTNFDEQLPNKKVLPKHSLLYEYFTVYNELTKVKYVTERMRKPEFLSGEQKKAIVDLLFKTNRKVTVKQLKEDYFKKIECFDSVEIIGVEDRFNASLGTYHDLLKIIKDKDFLDNEENEDILEDIVLTLTLFEDREMIEERLKTYAHLFDDKVMKQLKRRHYTGWGRLSRKMINGIRDKQSGKTILDFLKSDGFSNRNFMQLIHDDSLTFKEEIEKAQVSGQGDSLHEQIADLAGSPAIKKGILQTVKIVDELVKVMGHKPENIVIEMARENQTTTKGLQQSRERKKRIEEGIKELESQILKENPVENTQLQNEKLYLYYLQNGRDMYVDQELDINRLSDYDVDHIVPQSFIKDDSIDNKVLTRSVENRGKSDNVPSEEVVKKMKNYWRQLLNAKLITQRKFDNLTKAERGGLSEADKAGFIKRQLVETRQITKHVARILDSRMNTKRDKNDKPIREVKVITLKSKLVSDFRKDFQLYKVRDINNYHHAHDAYLNAVVGTALIKKYPKLESEFVYGDYKVYDVRKMIAKSEQEIGKATAKRFFYSNIMNFFKTEVKLANGEIRKRPLIETNGETGEVVWNKEKDFATVRKVLAMPQVNIVKKTEVQTGGFSKESILSKRESAKLIPRKKGWDTRKYGGFGSPTVAYSILVVAKVEKGKAKKLKSVKVLVGITIMEKGSYEKDPIGFLEAKGYKDIKKELIFKLPKYSLFELENGRRRMLASATELQKANELVLPQHLVRLLYYTQNISATTGSNNLGYIEQHREEFKEIFEKIIDFSEKYILKNKVNSNLKSSFDEQFAVSDSILLSNSFVSLLKYTSFGASGGFTFLDLDVKQGRLRYQTVTEVLDATLIYQSITGLYETRTDLSQLGGD

SEQ ID NO: 655 - protein, 1345 aa, Streptococcus constellatus
MGKPYSIGLDIGTNSVGWAVVTDDYKVPAKKMKVLGNTDKQSIKKNLLGALLFDSGETAEATRLKRTARRRYTRRKNRLRYLQEIFTGEMNKVDENFFQRLDDSFLVDEDKRGEHHPIFGNIAAEVKYHDDFPTIYHLRRHLADTSKKADLRLVYLALAHMIKFRGHFLYEGDLKAENTDVQALFKDFVEEYDKTIEESHLSEITVDALSILTEKVSKSSRLENLIAHYPTEKKNTLFGNLIALSLDLHPNFKTNFQLSEDAKLQFSKDTYEEDLEGFLGEVGDEYADLFASAKNLYDAILLSGILTVDDNSTKAPLSASMVKRYEEHQKDLKKLKDFIKVNAPDQYNAIFKDKNKKGYASYIESGVKQDEFYKYLKGILLKINGSGDFLDKIDREDFLRKQRTFDNGSIPHQIHLQEMHAILRRQGEHYPFLKENQDKIEKILTFRIPYYVGPLARKGSRFAWAEYKADEKITPWNFDDILDKEKSAEKFITRMTLNDLYLPEEKVLPKHSPLYEAFTVYNELTKVKYVNEQGEAKFFDTNMKQEIFDHVFKENRKVTKDKLLNYLNKEFEEFRIVNLTGLDKENKAFNSSLGTYHDLRKILDKSFLDDKANEKTIEDIIQTLTLFEDREMIRQRLQKYSDIFTKAQLKKLERRHYTGWGRLSYKLINGIRNKENKKTILDYLIDDGYANRNFMQLINDDALSFKEEIARAQIIDDVDDIANVVHDLPGSPAIKKGILQSVKIVDELVKVMGHNPANIIIEMARENQTTDKGRRNSQQRLKLLQDSLKNLDNPVNIKNVENQQLQNDRLFLYYIQNGKDMYTGETLDINNLSQYDIDHIIPQAFIKDNSLDNRVLTRSDKNRGKSDDVPSIEVVHEMKSFWSKLLSVKLITQRKFDNLTKAERGGLTEEDKAGFIKRQLVETRQITKHVAQILDERFNTEFDGNKRRIRNVKIITLKSNLVSNFRKEFELYKVREINDYHHAHDAYLNAVVGNALLLKYPQLEPEFVYGEYPKYNSYRSRKSATEKFLFYSNILRFFKKEDIQTNEDGEIAWNKEKHIKILRKVLSYPQVNIVKKTEEQTGGFSKESILPKGESDKLIPRKTKNSYWDPKKYGGFDSPVVAYSILVFADVEKGKSKKLRKVQDMVGITIMEKKRFEKNPVDFLEQRGYRNVRLEKIIKLPKYSLFELENKRRRLLASAKELQKGNELVIPQRFTTLLYHSYRIEKDYEPEHREYVEKHKDEFKELLEYISVFSRKYVLADNNLTKIEMLFSKNKDAEVSSLAKSFISLLTFTAFGAPAAFNFFGENIDRKRYTSVTECLNATLIHQSITGLYETRIDLSKLGED

SEQ ID NO: 656 - protein, 538 aa, Streptococcus dysgalactiae
DYDVDHIVPQSFIKDDSIDNKVLTRSDKNRGKSDNVPSEEVVKKMKNYWRQLLNAKLITQRKFDNLTKAERGGLSELDKAGFIKRQLVETRQITKHVAQILDSRMNTKYDENDKLIREVKVITLKSKLVSDFRKDFQFYKVREINNYHHAHDAYLNAVVGTALIKKYPKLESEFVYGDYKVYDVRKMIAKSEQEIGKATAKRFFYSNIMNFFKTEITLANGEIRKRPLIETNEETGEIVWDKGRDFATVRKVLSMPQVNIVKKTEVQTGALTNESIYARGSFDKLISRKHRFESSKYGGFGSPTVTYSVLVVAKSKVQDGKVKKIKTGKELIGITLLDKLVFEKNPLKFIEDKGYGNVQIDKCIRLPKYSLFEFENGTRRMLASVMANNNSRGDLQKANEMFLPAKLVTLLYHAHKIESSKELEHEAYILDHYNDLYQLLSYIERFASLYVDVEKNISKVKELFSNIESYSISEICSSVINLLTLTASGAPADFKFLGTTIPRKRYGSPQSILSSTLIHQSITGLYETRIDLSQLGGD

SEQ ID NO: 657 - protein, 1155 aa, Streptococcus dysgalactiae
MDKKYSIGLDIGTNSVGWAVITDDYKVPSKKFKVLGNTDRHSIKKNLIGALLFDSGETAEATRLKRSARRRYTRRKNRIRYLQEIFSSEMSKVDDSFFHRLEESFLVEEDKKHERHPIFGNIVDEVAYHEKYPTIYHLRKKLADSTDKADLRLIYLALAHMIKFRGHFLIEGDLNPDNSDMDKLFIQLVQTYNQLFEENPINASRVDAKAILSARLSKSRRLENLIAQLPGEKRNGLFGNLIALSLGLTPNFKSNFDLAEDAKLQLSKDTYDDDLDNLLAQIGDQYADLFLAAKNLSDAILLSDILRVNSEITKAPLSASMIKRYDEHHQDLTLLKALVRQQLPEKYKEIFFDQSKNGYAGYIDGGASQEEFYKFIKPILEKMDGTEELLAKLNREDLLRKQRTFDNGSIPHQIHLGELHAILRRQEDFYPFLKDNREKIEKILTFRIPYYVGPLARGNSRFAWMTRKSEETITPWNFEEVVDKGASAQSFIERMTNFDKNLPNEKVLPKHSLLYEYFTVYNELTKVKYVTEGMRKPEFLSGKQKEAIVDLLFKTNRKVTVKQLKEDYFKKIECFDSVEISGVEDRFNASLGTYHDLLKIIKDKDFLDNEENEDILEDIVLTLTLFEDKEMIEERLKTYAHLFDDKVMKQLKRRHYTGWGRLSRKLINGIRDKQSGKTILDFLKSDGFANRNFIQLIHDDSLTFKEAIQKAQVSGQGHSLHEQIANLAGSPAIKKGILQSVKVVDELVKVMGHKPENIVIEMARENQTTQKGQKNSRERMKRIEEGIKELGSQILKEHPVENTQLQNEKLYLYYLQNRRDMYVDQELDINRLSDYDVDHIVPQSFIKDDSIDNKVLTRSDKNRGKSDDVPSEEVVKKMKNYWRQLLNAKLITQRKFDNLTKAERGGLSELDKAGFIKRQLVETRQITKHVAQILDSRMNTKYDENDKLIREVKVITLKSKLVSDFRKDFQFYKVREINNYHHAHDAYLNAVVGTALIKKYPKLESEFVYGDYKVYDVRKMIAKSEQEIGKATAKRFFYSNIMNFFKTEITLANGEIRKRPLIETNEETGEIVWDKGRDFATVRKVLSMPQVNIVKKTEVQTGALTNESIYARGSFDKLISRKHRFESSKYGGFGSPTVTYSVLVVAKYQSYKMEK

SEQ ID NO: 658 - protein, 1371 aa, Streptococcus dysgalactiae
MDKKYSIGLDIGTNSVGWAVITDDYKVPSKKFKVLGNTDRHSIKKNLIGALLFDSGETAEATRLKRTARRRYTRRKNRIRYLQEIFSSEMSKVDDSFFHRLEESFLVEEDKKHERHPIFGNIVDEVAYHEKYPTIYHLRKKLADSTDKADLRLIYLALAHMIKFRGHFLIEGDLNPDNSDMDKLFIQLVQTYNQLFEENPINASRVDAKAILSARLSKSRRLENLIAQLPGEKRNGLFGNLIALSLGLTPNFKSNFDLAEDAKLQLSKDTYDDDLDNLLAQIGDQYADLFLAAKNLSDAILLSDILRVNSEITKAPLSASMIKRYDEHHQDLTLLKALVRQQLPEKYKEIFFDQSKNGYAGYIDGGASQEEFYKFIKPILEKMDGTEELLAKLNREDLLRKQRTFDNGSIPHQIHLGELHAILRRQEDFYPFLKDNREKIEKILTFRIPYYVGPLARGNSRFAWMTRKSEETITPWNFEEVVDKGASAQSFIERMTNFDKNLPNEKVLPKHSLLYEYFTVYNELTKVKYVTEGMRKPEFLSGKQKEAIVDLLFKTNRKVTVKQLKEDYFKKIECFDSVEISGVEDRFNASLGTYHDLLKIIKDKDFLDNEENEDILEDIVLTLTLFEDKEMIEERLKTYAHLFDDKVMKQLKRRHYTGWGRLSRKLINGIRDKQSGKTILDFLKSDGFANRNFIQLIHDDSLTFKEAIQKAQVSGQGHSLHEQIANLAGSPAIKKGILQSVKVVDELVKVMGHKPENIVIEMARENQTTQKGQKNSRERMKRIEEGIKELGSQILKEHPVENTQLQNEKLYLYYLQNGRDMYVDQELDINRLSDYDVDHIVPQSFIKDDSIDNKVLTRSDKNRGKSDDVPSEEVVKKMKNYWRQLLNAKLITQRKFDNLTKAERGGLSELDKAGFIKRQLVETRQITKHVAQILDSRMNTKYDENDKLIREVKVITLKSKLVSDFRKDFQFYKVREINNYHHAHDAYLNAVVGTALIKKYPKLESEFVYGDYKVYDVRKMIAKSEQEIGKATAKRFFYSNIMNFFKTEITLANGEIRKRPLIETNEETGEIVWNKGRDFATVRKVLSMPQVNIVKKTEVQTGALTNESIYARGSFDKLISRKHRFESSKYGGFGSPTVTYSVLVVAKSKVQDGKVKKIKTGKELIGITLLDKLVFEKNPLKFIEDKGYGNVQIDKCIKLPKYSLFEFENGTRRMLASVMANNNSRGDLQKANEMFLPAKLVTLLYHAHKIESSKELEHEAYILDHYNDLYQLLSYIERFASLYVDVEKNISKVKELFSNIESYSISEICSSVINLLTLTASGAPADFKFLGTTIPRKRYGSPQSILSSTLIHQSITGLYETRIDLSQLGGD

SEQ ID NO: 659 - protein, 1371 aa, Streptococcus dysgalactiae
MDKKYSIGLDIGTNSVGWAVITDDYKVPSKKFKVLGNTDRHSIKKNLIGALLFDSGETAEATRLKRTARRRYTRRKNRIRYLQEIFSSEMSKVDDSFFHRLEESFLVEEDKKHERHPIFGNIVDEVAYHEKYPTIYHLRKKLADSTDKADLRLIYLALAHMIKFRGHFLIEGDLNPDNSDMDKLFIQLVQTYNQLFEENPINASRVDAKAILSARLSKSRRLENLIAQLPGEKRNGLFGNLIALSLGLTPNFKSNFDLAEDAKLQLSKDTYDDDLDNLLAQIGDQYADLFLAAKNLSDAILLSDILRVNSEITKAPLSASMIKRYDEHHQDLTLLKALVRQQLPEKYKEIFFDQSKNGYAGYIDGGASQEEFYKFIKPILEKMDGTEELLAKLNREDLLRKQRTFDNGSIPHQIHLGELHAILRRQEDFYPFLKDNREKIEKILTFRIPYYVGPLARGNSRFAWMTRKSEETITPWNFEEVVDKGASAQSFIERMTNFDKNLPNEKVLPKHSLLYEYFTVYNELTKVKYVTEGMRKPEFLSGKQKEAIVDLLFKTNRKVTVKQLKEDYFKKIECFDSVEISGVEDRFNASLGTYHDLLKIIKDKDFLDNEENEDILEDIVLTLTLFEDKEMIEERLKKYANLFDDKVMKQLKRRHYTGWGRLSRKLINGIRDKQSGKTILDFLKSDGFANRNFMQLINDDSLTFKEAIQKAQVSGQGHSLHEQIANLAGSPAIKKGILQSVKVVDELVKVMGHKPENIVIEMARENQTTQKGQKNSRERMKRIEEGIKELGSQILKEHPVENTQLQNEKLYLYYLQNGRDMYVDQELDINRLSDYDVDHIVPQSFIKDDSIDNKVLTRSDKNRGKSDNVPSEEVVKKMKNYWRQLLNAKLITQRKFDNLTKAERGGLSELDKAGFIKRQLVETRQITKHVAQILDSRMNTKYDENDKLIREVKVITLKSKLVSDFRKDFQFYKVREINNYHHAHDAYLNAVVGTALIKKYPKLESEFVYGDYKVYDVRKMIAKSEQEIGKATAKRFFYSNIMNFFKTEITLANGEIRKRPLIETNEETGEIVWDKGRDFATVRKVLSMPQVNIVKKTEVQTGALTNESIYARGSFDKLISRKHRFESSKYGGFGSPTVTYSVLVVAKSKVQDGKVKKIKTGKELIGITLLDKLVFEKNPLKFIEDKGYGNVQIDKCIKLPKYSLFEFENGTRRMLASVMANNNSRGDLQKANEMFLPAKLVTLLYHAHKIESSKELEHEAYILDHYNDLYQLLSYIERFASLYVDVEKNISKVKELFSNIESYSISEICSSVINLLTLTASGAPADFKFLGTTIPRKRYGSPQSILSSTLIHQSITGLYETRIDLSQLGGD

SEQ ID NO: 660 - protein, 1371 aa, Streptococcus dysgalactiae
MDKKYSIGLDIGTNSVGWAVITDDYKVPSKKFKVLGNTDRHSIKKNLIGALLFDSGETAEATRLKRTARRRYTRRKNRIRYLQEIFSSEMSKVDDSFFHRLEESFLVEEDKKHERHPIFGNIVDEVAYHEKYPTIYHLRKKLADSTDKADLRLIYLALAHMIKFRGHFLIEGDLNPDNSDVDKLFIQLVQTYNQLFEEKPINASGVDAKAILSARLSKSKRLENLIAQLPGEKKNGLFGNLIALSLGLTPNFKSNFDLAEDAKLQLSKDTYDDDLDNLLAQIGNQYADLFLAAKNLSDAILLSDILRVNSEITKAPLSASMIKRYDEHHQDLTLLKALVRQQLPEKYKEIFFDQSKNGYAGYIDGGASQEEFYKFIKPILEKMDGTEELLAKLNREDLLRKQRTFDNGSIPHQIHLGELHAILRRQEDFYPFLKDNREKIEKILTFRIPYYVGPLARGNSRFAWMTRKSEETITPWNFEEVVDKGASAQSFIERMTNFDKNLPNEKVLPKHSLLYEYFTVYNELTKVKYVTEGMRKPEFLSGKQKEAIVDLLFKTNRKVTVKQLKEDYFKKIECFDSVEISGVEDRFNASLGTYHDLLKIIKDKDFLDNEENEDILEDIVLTLTLFEDKEMIEERLKKYANLFDDKVMKQLKRRHYTGWGRLSRKLINGIRDKQSGKTILDFLKSDGFANRNFMQLINDDSLTFKEAIQKAQVSGQGHSLHEQIANLAGSPAIKKGILQSVKVVDELVKVMGHKPENIVIEMARENQTTQKGQKNSRERMKRIEEGIKELGSQILKEHPVENTQLQNEKLYLYYLQNGRDMYVDQELDINRLSDYDVDHIVPQSFIKDDSIDNKVLTRSDKNRGKSDNVPSEEVVKKMKNYWRQLLNAKLITQRKFDNLTKAERGGLSELDKAGFIKRQLVETRQITKHVAQILDSRMNTKYDENDKLIREVKVITLKSKLVSDFRKDFQFYKVREINNYHHAHDAYLNAVVGTALIKKYPKLESEFVYGDYKVYDVRKMIAKSEQEIGKATAKRFFYSNIMNFFKTEITLANGEIRKRPLIETNEETGEIVWDKGRDFATVRKVLSMPQVNIVKKTEVQTGALTNESIYARGSFDKLISRKHRFESSKYGGFGSPTVTYSVLVVAKSKVQDGKVKKIKTGKELIGITLLDKLVFEKNPLKFIEDKGYGNVQIDKCIKLPKYSLFEFENGTRRMLASVMANNNSRGDLQKANEMFLPAKLVTLLYHAHKIESSKELEHEAYILDHYNDLYQLLSYIERFASLYVDVEKNISKVKELFSNIESYSISEICSSVINLLTLTASGAPADFKFLGTTIPRKRYGSPQSILSSTLIHQSITGLYETRIDLSQLGGD

SEQ ID NO: 661 - protein, 1370 aa, Streptococcus gallolyticus; identical to SEQ ID NO: 209

SEQ ID NO: 662 - protein, 1375 aa, Streptococcus infantarius
MEKSYSIGLDIGTNSVGWAVITDDYKVPAKKMKVLGNTDKKYIKKNLLGALLFDSGETAEVTRLKRTARRRYTRRKNRLRYLQEIFAKEMTKVDESFFQRLEESFLTDDDKTFDSHPIFGNKAEEDAYHQKFPTIYHLRKYLADSQEKADLRLVYLALAHMIKYRGHFLIEGELNAENTDVQKLFNVFVETYDKIVDESHLSEIEVDASSILTEKVSKSRRLENLIKQYPTEKKNTLFGNLIALALGLQPNFKTNFKLSEDAKLQFSKDTYEEDLEELLGKVGDDYADLFISAKNLYDAILLSGILTVDDNSTKAPLSASMIKRYVEHHEDLEKLKEFIKINKLKLYHDIFKDKTKNGYAGYIDNGVKQDEFYKYLKTILTKIDDSDYFLDKIERDDFLRKQRTFDNGSIPHQIHLQEMHSILRRQGDYYPFLKENQAKIEKILTFRIPYYVGPLARKDSRFAWANYHSDEPITPWNFDEVVDKEKSAEKFITRMTLNDLYLPEEKVLPKHSHVYETFTVYNELTKIKYVNEQGESFFFDANMKQEIFDHVFKENRKVTKAKLLSYLNNEFEEFRINDLIGLDKDSKSFNASLGTYHDLKKILDKSFLDDKTNGQIIEDIVLTLTLFEDRDMIHERLQKYSDFFTSQQLKKLERRHYTGWGRLSYKLINGIRNKENNKTILDFLIDDGHANRNFMQLINDESLSFKTIIQEAQVVGDVDDIEAVVHDLPGSPAIKKGILQSVKIVDELVKVMGDNPDNIVIEMARENQTTGYGRNKSNQRLKRLQDSLKEFGSDILSKKKPSYVDSKVENSHLQNDRLFLYYIQNGKDMYTGEELDIDRLSDYDIDHIIPQAFIKDNSIDNKVLTSSAKNRGKSDDVPSIEIVRNRRSYWYKLYKSGLISKRKFDNLTKAERGGLTEADKAGFIKRQLVETRQITKHVAQILDARFNTKRDENDKVIRDVKVITLKSNLVSQFRKEFKFYKVREINDYHHAHDAYLNAVVGTALLKKYPKLTPEFVYGEYKKYDVRKLIAKSSDDYSEMGKATAKYFFYSNLMNFFKTEVKYADGRVFERPDIETNADGEVVWNKQKDFDIVRKVLSYPQVNIVKKVEAQTGGFSKESILSKGDSDKLIPRKTKKVYWNTKKYGGFDSPTVAYSVLVVADIEKGKAKKLKTVKELVGISIMERSFFEENPVSFLEKKGYHNVQEDKLIKLPKYSLFEFEGGRRRLLASATELQKGNEVMLPAHLVELLYHAHRIDSFNSTEHLKYVSEHKKEFEKVLSCVENFSNLYVDVEKNLSKVRAAAESMTNFSLEEISASFINLLTLTALGAPADFNFLGEKIPRKRYTSTKECLSATLIHQSVTGLYETRIDLSKLGEE

SEQ ID NO: 663 - protein, 1368 aa, Streptococcus iniae
MRKPYSIGLDIGTNSVGWAVITDDYKVPSKKMRIQGTTDRTSIKKNLIGALLFDNGETAEATRLKRTTRRRYTRRKYRIKELQKIFSSEMNELDIAFFPRLSESFLVSDDKEFENHPIFGNLKDEITYHNDYPTIYHLRQTLADSDQKADLRLIYLALAHIIKFRGHFLIEGNLDSENTDVHVLFLNLVNIYNNLFEEDIVETASIDAEKILTSKTSKSRRLENLIAEIPNQKRNMLFGNLVSLALGLTPNFKTNFELLEDAKLQISKDSYEEDLDNLLAQIGDQYADLFIAAKKLSDAILLSDIITVKGASTKAPLSASMVQRYEEHQQDLALLKNLVKKQIPEKYKEIFDNKEKNGYAGYIDGKTSQEEFYKYIKPILLKLDGTEKLISKLEREDFLRKQRTFDNGSIPHQIHLNELKAIIRRQEKFYPFLKENQKKIEKLFTFKIPYYVGPLANGQSSFAWLKRQSNESITPWNFEEVVDQEASARAFIERMTNFDTYLPEEKVLPKHSPLYEMFMVYNELTKVKYQTEGMKRPVFLSSEDKEEIVNLLFKKERKVTVKQLKEEYFSKMKCFHTVTILGVEDRFNASLGTYHDLLKIFKDKAFLDDEANQDILEEIVWTLTLFEDQAMIERRLVKYADVFEKSVLKKLKKRHYTGWGRLSQKLINGIKDKQTGKTILGFLKDDGVANRNFMQLINDSSLDFAKIIKNEQEKTIKNESLEETIANLAGSPAIKKGILQSIKIVDEIVKIMGQNPDNIVIEMARENQSTMQGIKNSRQRLRKLEEVHKNTGSKILKEYNVSNTQLQSDRLYLYLLQDGKDMYTGKELDYDNLSQYDIDHIIPQSFIKDNSIDNTVLTTQASNRGKSDNVPNIETVNKMKSFWYKQLKSGAISQRKFDHLTKAERGALSDFDKAGFIKRQLVETRQITKHVAQILDSRFNSNLTEDSKSNRNVKIITLKSKMVSDFRKDFGFYKLREVNDYHHAQDAYLNAVVGTALLKKYPKLEAEFVYGDYKHYDLAKLMIQPDSSLGKATTRMFFYSNLMNFFKKEIKLADDTIFTRPQIEVNTETGEIVWDKVKDMQTIRKVMSYPQVNIVMKTEVQTGGFSKESIWPKGDSDKLIARKKSWDPKKYGGFDSPIIAYSVLVVAKIAKGKTQKLKTIKELVGIKIMEQDEFEKDPIAFLEKKGYQDIQTSSIIKLPKYSLFELENGRKRLLASAKELQKGNELALPNKYVKFLYLASHYTKFTGKEEDREKKRSYVESHLYYFDEIMQIIVEYSNRYILADSNLIKIQNLYKEKDNFSIEEQAINMLNLFTFTDLGAPSAFKFFNGDIDRKRYSSTNEIINSTLIYQSPTGLYETRIDLSKLGGK

SEQ ID NO: 664 - protein, 1392 aa, Streptococcus mitis
MNNNNYSIGLDIGTNSVGWAVITDDYKVPSKKMKVLGNTDKHFIKKNLIGALLFDEGATAEDRRFKRTARRRYTRRKNRLRYLQEIFSEEMSKVDSSFFHRLDDSFLVPEDKRGSKYPIFATLAEEKEYHKKFPTIYHLRKHLADSKEKTDLRLIYLALAHMIKYRGHFLYEESFDIKNNDIQKIFSEFISIYDNTFEGSSLSGQNAQVEAIFTDKISKSAKRERILKLFAYEKSTDLFSEFLKLIVGNQADFKKHFDLEEKAPLQFSKDTYDEDLENLLGQIGDDFADLFLVAKKLYDAILLSGILTVTDSSTKAPLSASMIERYENHQKDLAALKQFIQNNLQEKYDEVFSDQSKDGYARYINGKTTQEAFYKYIKNLLSKFEGSDYFLDKIEREDFLRKQRTFDNGSIPHQIHLQEMNAIIRRQGEHYPFLKEYKEKIETILTFRIPYYVGPLARGNRNFAWLTRNSDQAIRPWNFEEIVDQASSAEEFINKMTNYDLYLPEEKVLPKHSLLYETFAVYNELTKVKFISEGLRDYQFLDSGQKKQIVNQLFKEKRKVTEKDIIQYLHNVDGYDGIELKGIEKQFNASLSTYHDLLKIIKDKEFMDDPKNEEILENIVHTLTIFEDREMIKQRLAQYASIFDKKVIKALTRRHYTGWGKLSAKLINGICDKKTGKTILDYLIDDGYSNRNFMQLINDDGLSFKDIIQKAQVVGKTNDVKQVVQELPGSPAIKKGILQSIKLVDELVKVMGHAPESIVIEIARENQTTARGKKNSQQRYKRIEDALKNLAPGLDSNILKEHPTDNIQLQNDRLFLYYLQNGKDMYTGEALDINQLSSYDIDHIVPQAFIKDDSLDNRVLTSSKDNRGKSDNVPSLEVVQKRKAFWQQLLDSKLISEHKFNNLTKAERGGLDERDKVGFIRRQLVETRQITKHVAQILDARFNTEVNEKDKKNRTVKIITLKSNLVSNFRKEFKLYKVREINDYHHAHDAYLNAVVAKAILKKYPKLEPGFVYGDYQKYDIKRYISRSKDPKEVEKATEKYFFYSNLLNFFKEEVHYADGTIVKRENIEYSKDTGEIAWNKEKDFATIKKVLSLPQVNIVKKTEIQTHGLDRGKPRGLFNSNPSPKPSEDRKENLVPIKQGLDPRKYGGYAGISNSYAVLVKAIIEKGAKKQQKTVLEFQGISILDKINFEKNKENYLLEKGYIKILSTITLPKYSLFEFPDGTRRRLASILSTNNKRGEIHKGNELVIPEKYTTLLYHAKNINKTLEPEHLEYVEKHRNDFAKLLEYVLNFNDKYVGALKNGERIRQAFIDWETVDIEKLCFSFIGPRNSKNAGLFELTSQGSASDFEFLGVKIPRYRDYTPSSLLNATLIHQSITGLYETRIDLSKLGED

SEQ ID NO: 665 - protein, 1134 aa, Streptococcus mutans
MANGKILGLDIGIASVGVGIIDKETGKIIHVNSRIFPAATADSNVERRGFRQGRRLVRRKKHRKVRLADLFLDSNLLTDFSKVSLNLNPYQLRVKGLNEELSNEELFIALKSIVSRRGISYLDDASEDSGANSSEYGKAVEENRKLLEDRTPGQIQLERFEKYGKVRGDFTVVENGENHRLINVFSTSAYKKEAERILRRQQEFNMRIADEFIEAYLTILTGKRKYYHGPGNEKSRTDYGRFRTDGTTLDNIFGILIGKCTFYPDEYRAAKASYTAQEFNLLNDLNNLTVPTETKKLSEEQKRQIIEHAKTVKTLGAPTLLKYIVKLVGCSADDIKGYRIDKSDKPEIHTFEAYRKMRTMELIKVDDLSRESLDALAHILTLNTEREGIEEAIRDRFTNKEFNQEQINELVLFRKNNSSLFGKGWHNFSLKLMKELIPELYETSEEQMTILTRLGKQRVKKSSNRTNYIDEKELTEEIYNPVVAKSVRQAIKIINLATKKYGVFDNIVIEMARESNEDDEKKAIQNAQKANEDEKKAALLKAAHQFNGKEELPDSIFHGHKELLTKIRLWHQQGEKCLYTGKTIFINDLIHNPYKYEIDHILPLSLSFDDSLANKVLVLSTANQEKGQRTPFQSLDSMDGAWTYREFKSYVKGLKTLSNKKKDYLLTEENIDKIEVKQKFIERNLVDTRYSSRVVLNALQDFYKERKFDTKISVVRGQFTSQLRRKWRIEKTRETYHHHAVDALIIAASSQLNLWKKQNNPLISYKEDQFVDPETGEILSLSDDEYKKLVFKAPYEHFVDTLKSKKFEDSILFSYQVDSKYNRKISGATICGTRKAQLGKDTQEETYVLGKIKDIYSQKGYEDFIKKYKKDKTQFLMYHKDPQTFEKVIEEILKTYPDKELNEKGKEVSCNPFEKYRQENGPVRKYSKKGNGPEIKSLKYYDEVLGKNIDITPKNSLNKVVLRSLNPWRTDVYFNHETRKYEFLGLKYSDLRYLKGEHRYGILIGDYKKIKDKEGIEKESEFKFTLYKNDLILIKDTAKGKEELFRFWSRTGKDNAKTFEKNKIELKPYSKSQFEKGEDTNVLGKLYASSNQLQKSFGTLENLSIYKVRTDVLGNKYFIKKEGDKPQLNFKKKL

SEQ ID NO: 666 - protein, 1134 aa, Streptococcus mutans; identical to SEQ ID NO: 665

SEQ ID NO: 667 - protein, 1128 aa, Streptococcus mutans
MANSKILGLDIGIASVGVGIIDKETGKIIHVNSRIFPAATADSNVERRGFRQGRRLVRRKKHRKVRLADLFLDSNLLTDFSKVSLNLNPYQLRVKGLNEELSNEELFIALKSIVSRRGISYLDDASEDSGANSSEYGKAVEENRKLLEDRTPGQIQLERFEKYGKVRGDFTVVENGENHRLINVFSTSAYKKEAERILRRQQEFNIRIADEFIEAYLTILTGKRKYYHGPGNEKSRTDYGRFRTDGTTLDNIFGILIGKCTFYPDEYRAAKASYTAQEFNLLNDLNNLTVPTETKKLSEEQKRQIIEHAKTVKTLGAPTLLKYIAKLVGCSADDIKGYRIDKSDKPEIHTFEAYRKMRTMELIKVADLSRESLDALAHILTLNTEREGIEEAIRDRFTNKEFNQEQINELVLFRKNNSSLFGKGWHNFSLKLMKELIPELYETSEEQMTILTRLGKQRVKKSSNRTNYIDEKELTEEIYNPVVAKSVRQAIKIINLATKKYGVFDNIVIEMARESNEDDEKKAIQNAQKANEDEKEAALLKAAHQFNGKEELPDSIFHGHKELLTKIRLWHQQGEKCLYTGKTIFINDLIHNPYKYEIDHILPLSLSFDDSLANKVLVLSTANQEKGQRTPFQSLDSMDGAWTYREFKAYVKGLKTLSNKKKDYLLNEEDINKNEVKQKFIERNLVDTRYSSRVVLNTLQDFYKKREFDTKISVVRGQFTSQIRRKWRIEKTRETYHHHAVDALIIAASSQLNLWKKQNNPLISYKEDQFVDPETGEILSLSDDEYKELVFKAPYDHFVDTLKSKKFEDSILFSYQVDSKYNRKISDATIYGTRKARLGKDSQEETYVLGKIKDIYSQKGYEDFIKKYKKDKTQFLMYHKDPQTFEKVIEEILKTYSDKELNEKGKEVPCNPFEKYRQENGPVRKYSKKGNGPEIKSIKYYDNKLGNHIDITPNNSHHQVVLQSLKPWRTDVYFNPKSGKYELMGLKYSDLRFEKVSGDYGISVKKYNEIKSKEGVDENSEFKFTLYKNDLILIKDTESGEQELFRFLSRTMPNQKHYVELKPYDKSKFEGHQKLMDIFGEVAKGGQCLKGLNKSNISIYKVKTDVLGNKYFIKKEGDQPQLNFKKKI

SEQ ID NO: 668 - protein, 1128 aa, Streptococcus mutans; identical to SEQ ID NO: 667

SEQ ID NO: 669 - protein, 1338 aa, Streptococcus mutans
MDLIGTNSVGWAVVTDDYKVPAKKMKVLGNTDKSHIKKNLLGALLFDSGNTAADRRLKRTARRRYTRRRNRILYLQEIFAEEMSKVDDSFFHRLEDSFLVTEDKRGERHPIFGNLEEEVKYHENFPTIYHLRQYLADNPEKVDLRLVYLALAHIIKFRGHFLIEGKFDTRNNDVQRLFQEFLAVYDNTFENSSLQEQNVQVEEILTDKISKSAKKDRVLKLFPNEKSNGRFAEFLKLIVGNQADFKKHFELEEKAPLQFSKDTYEEELEVLLAQIGDNYAELFLSAKKLYDSILLSGILTVTDVSTKAPLSASMIQRYNEHQMDLAQLKQFIRQKLSDKYNEVFSDVSKDGYAGYIDGKTNQEAFYKYLKGLLNKIEGSGYFLDKIEREDFLRKQRTFDNGSIPHQIHLQEMRAIIRRQAEFYPFLADNQDRIEKILTFRIPYYVGPLARGKSDFAWLSRKSADKITPWNFDEIVDKESSAEAFINRMTNYDLYLPNQKVLPKHSLLYEKFTVYNELTKVKYKTEQGKTAFFDANMKQEIFDGVFKVYRKVTKDKLMDFLEKEFDEFRIVDLTGLDKENKAFNASYGTYHDLRKILDKDFLDNSKNEKILEDIVLTLTLFEDREMIRKRLENYSDLLTKEQVKKLERRHYTGWGRLSAELIHGIRNKESRKTILDYLIDDGNSNRNFMQLINDDALSFKEEIAKAQVIGETDNLNQVVSDIAGSPAIKKGILQSLKIVDELVKIMGHQPENIVVEMARENQFTNQGRRNSQQRLKGLTDSIKEFGSQILKEHPVEHSQLQNDRLFLYYLQNGRDMYTGEELDIDYLSQYDIDHIIPQAFIKDNSIDNRVLTSSKENRGKSDDVPSKNVVRKMKSYWSKLLSAKLITQRKFDNLTKAERGGLTDDDKAGFIKRQLVETRQITKHVARILDERFHTETDENNKKIRQVKIVTLKSNLVSNFRKEFELYKVREINDYHHAHDAYLNAVIGKALLGVYPQLEPEFVYGDYPHFHGHKENKATAKKFFYSNIMNFFKKDDVRTDKNGEIIWKKDEHISNIKKVLSYPQVNIVKKVEEQTGGFSKESILPKGNSDKLIPRKTKKFYWDTKKYGGFDSPIVAYSILVIADIEKGKSKKLKTVKALVGVTIMEKMTFERDPVAFLERKGYRNVQEENIIKLPKYSLFKLENGRKRLLASARELQKGNEIVLPNHLGTLLYHAKNIHKVDEPKHLDYVDKHKDEFKELLDVVSNFSKKYTLAEGNLEKIKELYAQNNGEDLKELASSFINLLTFTAIGAPATFKFFDKNIDRKRYTSTTEILNATLIHQSITGLYETRIDLSKLGGD

SEQ ID NO: 670 - protein, 1338 aa, Streptococcus mutans; identical to SEQ ID NO: 669

SEQ ID NO: 671 - protein, 1345 aa, Streptococcus mutans
MKKPYSIGLDIGTNSVGWAVVTDDYKVPAKKMKVLGNTDKSHIEKNLLGALLFDSGNTAEDRRLKRTARRRYTRRRNRILYLQEIFSEEMGKVDDSFFHRLEDFFLVTEDKRGERHPIFGNLEEEVKYHENFPTIYHLRQYLADNPEKVDLRLVYLALAHIIKFRGHFLIEGKFDTRNNDVQRLFQEFLAVYDNTFENSSLQEQNVQVEEILTDKISKSAKKDRVLKLFPNEKSNGRFAEFLKLIVGNQADFKKHFELEEKAPLQFSKDTYEEELEVLLAQIGDNYAELFLSAKKLYDSILLSGILTADDSSTKAPLSASMIQRYNEHQMDLAQLKQFIRQKLSDKYNEVFSDVSKDGYAGYIDGKTNQEAFYKYLKGLLNKIEGSGYFLDKIEREDFLRKQRTFDNGSIPHQIHLQEMRAIIRRQSEFYPFLADNQDRIEKILTFRIPYYVGPLARGKSDFAWLSRKSADKITPWNFDEIVDKESSAEAFINRMTNYDLYLPNQKVLPKHSLLYEKFTVYNELTKVKYKTEQGETAFFDANMKQEIFDGVFKVYRKVTKDKLMDFLEKEFDEFRIVDLTGLDKENKAFNASYGTYHDLRKILDKDFLDNSKNEKILEDIVLTLTLFEDREMIRKRLKNYSDLLTKEQLKKLERRHYTGWGRLSAELIHGIRNKESRKTILDYLIDDGNSNRNFMQLINDDALSFKEEIAKAQVIGETDNLNQVVSDIAGSPAIKKGILQSLKIVDELVKIMGHQPENIVVEMARENQFTNQGRRNSQQRLKGLTDSIKEFGSQILKEHPVENSQLQNDRLFLYYLQNGRDMYTGEELDIDYLSQYDIDHIIPQAFIKDNSIDNRVLTSSKENRGKSDDVPSKDVVRKMKPYWSKLLSAKLITQRKFDNLTKAERGGLTDDDKAGFIKRQLVETRQITKHVARILDERFNTETDENNKKIRQVKIVTLKSNLVSNFRKEFELYKVREINDYHHAHDAYLNAVIGKALLGVYPQLEPEFVYGDYPHFHGHEENKATAKKFFYSNIMNFFKKDDVRTDKNGEIIWKKDEHISNIKKVLSYPQVNIVKKVEEQTGGFSKESILPKGNSDKLIPRKTKKFYWDTKKYGGFDSPIVAYSILVIADIEKGKSKKLKTVKALVGVTIMEKMTFERDPVAFLERKGYRNVQEENIIKLPKYSLFKLENGRKRLLASARELQKGNEIVLPNHLGTLLYHAKNIHKVDEPKHLDYVDKHKDEFKELLDVVSNFSKKYTLAEGNLEKIKELYAQNNGEDLKELASSFINLLTFTAIGAPATFKFFDKNIDRKRYTSTTEILNATLIHQSITGLYETRIDLSKLGGD

SEQ ID NO: 672 - protein, 1345 aa, Streptococcus mutans; identical to SEQ ID NO: 671

SEQ ID NO: 673 - protein, 1229 aa, Streptococcus mutans
MKKPYSIGLDIGTNSVGWAVVTDDYKVPAKKMKVLGNTDKSHIEKNLLGALLFDSGNTAEDRRLKRTARRRYTRRRNRILYLQEIFSEEMGKVDDSFFHRLEDSFLVTEDKRGERHPIFGNLEEEVKYHENFPTIYHLRQYLADNPEKVDLRLVYLALAHIIKFRGHFLIEGKFDTRNNDVQRLFQEFLAVYDNTFENSSLQEQNIQVEEILTDKISKSAKKDRVLKLFPNEKSNGRFAEFLKLIVGNQADFKKHFELEEKAPLQFSKDTYEEELEVLLAQIGDNYAELFLSAKKLYDSILLSGILTVTDVGTKAPLSASMIQRYNEHQMDLTQLKQFIRQKLSDKYNEVFSDVSKDGYAGYIDGKTNQEAFYKYLKGLLNKIEGSGYFLDKIEREDFLRKQRTFDNGSIPHQIHLQEMRAIIRRQAEFYPFLADNQDRIEKILTFRIPYYVGPLARGKSDFAWLSRKSADKITPWNFDEIVDKESSAEAFINRMTNYDLYLPNQKVLPKHSLLYEKFTVYNELTKVKYKTEQGKTAFFDANMKQEIFDGVFKVYRKVTKDKLMDFLEKEFDEFRIVDLTGLDKENKVFNASYGTYHDLCKILDKDFLDNSKNEKILEDIVLTLTLFEDREMIRKRLENYSDLLTKEQVKKLERRHYTGWGRLSAELIHGIRNKESRKTILDYLIDDGNSNRNFMQLINDDALSFKEEIAKAQVIGETDNLNQVVSDIAGSPAIKKGILQSLKIVDELVKIMGHQPENIVVEMARENQFTNQGRRNSQQRLKGLTDSIKEFGSQILKEHPVENSQLQNDRLFLYYLQNGRDMYTGEELDIDYLSQYDIDHIIPQAFIKDNSIDNRVLTSSKENRGKSDDVPSKDVVRKMKPYWSKLLSAKLITQRKFDNLTKAERGGLTDDDKAGFIKRQLVETRQITKHVARILDERFNTETDENNKKIRQVKIVTLKSNLVSNFRKEFELYKVREINDYHHAHDAYLNAVIGKALLGVYPQLEPEFVYGDYPHFHGHEENKATAKKFFYSNIMNFFKKDDVRTDKNGEIIWKKDEHISNIKKVLSYPQVNIVKKVEEQTIGQNGGLFDDNPKSPLEVIPSKLVPLKKALNPEKYGGYQKPTTAYPILLIVDTKQLIPISVMDKKRFEQNPVKFLKDKGYQQIEKNNFVKLPKYTLVDIGNGIKRLWASSKEVHKGNQLVVSKKSQDLLYHAHHLDNDYSNEYVKNHY

SEQ ID NO: 674 - protein, 1229 aa, Streptococcus mutans; identical to SEQ ID NO: 673

SEQ ID NO: 675 - protein, 1345 aa, Streptococcus mutans
MKKPYSIGLDIGTNSVGWAVVTDDYKVPAKKMKVLGNTDKSHIEKNLLGALLFDSGNTAEDRRLKRTARRRYTRRRNRILYLQEIFSEEMGKVDDSFFHRLEDSFLVTEDKRGERHPIFGNLEEEVKYHENFPTIYHLRQYLADNPEKVDLRLVYLALAHIIKFRGHFLIEGKFDTRNNDVQRLFQEFLAVYDNTFENSSLQEQNVQVEEILTDKISKSAKKDRVLKLFPNEKSNGRFAEFLKLIVGNQADFKKHFELEEKAPLQFSKDTYEEELEVLLAQIGDNYAELFLSAKKLYDSILLSGILTVTDVGTKAPLSASMIQRYNEHQMDLAQLKQFIRQKLSDKYNEVFSDVSKDGYAGYIDGKTNQEAFYKYLKGLLNKIEGSGYFLDKIEREDFLRKQRTFDNGSIPHQIHLQEMRAIIRRQAEFYPFLADNQDRIEKLLTFRIPYYVGPLARGKSDFAWLSRKSADKITPWNFDEIVDKESSAEAFINRMTNYDLYLPNQKVLPKHSLLYEKFTVYNELIKVKYKTEQGKTAFFDANMKQEIFDGVFKVYRKVTKDKLMDFLEKEFDEFRIVDLTGLDKENKVFNASYGTYHDLCKILDKDFLDNSKNEKILEDIVLTLTLFEDREMIRKRLENYSDLLTKEQVKKLERRHYTGWGRLSAELIHGIRNKESRKTILDYLIDDGNSNRNFMQLINDDALSFKEEIAKAQVIGETDNLNQVVSDIAGSPAIKKGILQSLKIVDELVKIMGHQPENIVVEMARENQFTNQGRRNSQQRLKGLTDSIKEFGSQILKEHPVENSQLQNDRLFLYYLQNGRDMYTGEELDIDYLSQYDIDHIIPQAFIKDNSIDNRVLTSSKENRGKSDDVPSKDVVRKMKSYWSKLLSAKLITQRKFDNLTKAERGGLTDDDKAGFIKRQLVETRQITKHVARILDERFNTETDENNKKIRQVKIVTLKSNLVSNFRKEFELYKVREINDYHHAHDAYLNAVIGKALLGVYPQLEPEFVYGDYPHFHGHKENKATAKKFFYSNIMNFFKKDDVRTDKNGEIIWKKDEHISNIKKVLSYPQVNIVKKVEEQTGGFSKESILPKGNSDKLIPRKTKKFYWDTKKYGGFDSPIVAYSILVIADIEKGKSKKLKTVKALVGVTIMEKMTFERDPVAFLERKGYRNVQEENIIKLPKYSLFKLENGRKRLLASARELQKGNEIVLPNHLGTLLYHAKNIHKVDEPKHLDYVDKHKDEFKELLDVVSNFSKKYTLAEGNLEKIKELYAQNNGEDLKELASSFINLLTFTAIGAPATFKFFDKNIDRKRYTSTTEILNATLIHQSITGLYETRIDLNKLGGD

SEQ ID NO: 676 - protein, 1350 aa, Streptococcus mutans
MKKPYSIGLDIGTNSVGWAVVTDDYKVPAKKMKVLGNTDKSHIEKNLLGALLFDSGNTAEDRRLKRTARRRYTRRRNRILYLQEIFSEEMGKVDDSFFHRLEDSFLVTEDKRGERHPIFGNLEEEVKYHENFPTIYHLRQYLADNPEKVDLRLVYLALAHIIKFRGHFLIEGKFDTRNNDVQRLFQEFLAVYDNTFENSSLQEQNVQVEEILTDKISKSAKKDRVLKLFPNEKSNGRFAEFLKLIVGNQADFKKHFELEEKAPLQFSKDTYEEELEVLLAQIGDNYAELFLSAKKLYDSILLSGILTVTDVSTKAPLSASMIQRYNEHQMDLTQLKQFIRQKLSDKYNEVFSDVSKDGYAGYIDGKTNQEAFYKYLKGLLNKIEGSGYFLDKIEREDFLRKQRTFDNGSIPHQIHLQEMRAIIRRQAEFYSFLADNQDRIEKILTFRIPYYVGPLARGKSDFAWLSRKSADKITPWNFDEIVDKESSAEAFINRMTNYDLYLPNQKVLPKHSLLYEKFTVYNELTKVKYKTEQGKTAFFDANMKQEIFDGVFKVYRKVTKDKLMDFLEKEFDEFRIVDLTGLDKENKAFNASYGTYHDLRKILDKDFLDNSKNEKILEDIVLTLTLFEDREMIRKRLENYSDLLTKEQVKKLERRHYTGWGRLSAELIHGIRNKESRKTILDYLIDDGNSNRNFMQLINDDALSFKEEIAKAQVIGETDNLNQVVSDIAGSPAIKKGILQSLKIVDELVKIMGHQPENIVVEMARENQFTNQGRRNSQQRLKGLTDSIKEFGSQILKEHPVENSQLQNDRLFLYYLQNGRDMYTGEELDIDYLSQYDIDHIIPQAFIKDNSIDNRVLTSSKENRGKSDDVPSEDVVNRMRPFWNKLLSSGLISQRKYNNLTKKELTLDDKAGFIKRQLVETRQITKHVARMLDERFNKEFDDNNKRIRKVKIVTLKSNLVSSFRKEFELYKVREINDYHHAHDAYLNAVVVKALLVKYSKLEPEFVYGEYPKYNSYRERKTATQKMFFYSNIMNMFKSKVKLADDQIVERPMIEVNDETGEIAWDKTKHITTVKKVLSYPQVNIVKKVEEQTIGQNGGLFDDNPKSPLEVIPSKLVPLKKALNPEKYGGYQKPTTAYPILLIVDTKQLIPISVMDKKRFEQNPVKFLKDKGYQQIEKNNFVKLPKYTLVDIGNGIKRLWASSKEVHKGNQLVVSKKSQDLLYHAHHLDNDYSNEYVKNHYQQFDILFNEITSFSKKCKLGKEHIQKIEEAYSKERDSASIEELADGFIKLLGFTQLGATSPFSFLGIKLNQKQYTGKKDYLLPCMEATLIHQSITGLYETRIDLSKLGGD

SEQ ID NO: 677 - protein, 1350 aa, Streptococcus mutans
MKKPYSIGLDIGTNSVGWAVVTDDYKVPAKKMKVLGNTDKSHIEKNLLGALLFDSGNTAEDRRLKRTARRRYTRRRNRILYLQEIFSEEMGKVDDSFFHRLEDSFLVTEDKRGERHPIFGNLEEEVKYHENFPTIYHLRQYLADNPEKVDLRLVYLALAHIIKFRGHFLIEGKFDTRNNDVQRLFQEFLAVYDNTFENSSLQEQNVQVEEILTDKISKSAKKDRVLKLFPNEKSNGRFAEFLKLIVGNQADFKKHFELEEKAPLQFSKDTYEEELEVLLAQIGDNYAELFLSAKKLYDSILLSGILTVTDVSTKAPLSASMIQRYNEHQMDLTQLKQFIRQKLSDKYNEVFSDVSKDGYAGYIDGKTNQEAFYKYLKGLLNKIEGSGYFLDKIEREDFLRKQRTFDNGSIPHQIHLQEMRAIIRRQAEFYPFLADNQDRIEKILTFRIPYYVGPLARGKSDFAWLSRKSADKITPWNFDEIVDKESSAEAFINRMTNYDLYLPNQKVLPKHSLLYEKFTVYNELTKVKYKTEQGKTAFFDANMKQEIFDGVFKVYRKVTKDKLMDFLEKEFDEFRIVDLTGLDKENKAFNASYGTYHDLRKILDKDFLDNSKNEKILEDIVLTLTLFEDREMIRKRLKNYSDLLTKEQLKKLERRHYTGWGRLSAELIHGIRNKESRKTILDYLIDDGNSNRNFMQLINDDALSFKEEIAKAQVIGETDNLNQVVSDIAGSPAIKKGILQSLKIVDELVKIMGHQPENIVVEMARENQFTNQGRQNSQQRLKGLTDSIKEFGSQILKEHPVENSQLQNDRLFLYYLQNGRDMYTGEELDIDYLSQYDIDHIIPQAFIKDNSIDNRVLTSSKENRGKSDDVPSEDVVNRMRPFWNKLLSSGLISQRKYNNLTKKELTLDDKAGFIKRQLVETRQITKHVARMLDERFNKEFDDNNKRICKVKIVTLKSNLVSSFRKEFELYKVREINDYHHAHDAYLNAVVVKALLVKYSKLEPEFVYGEYPKYNSYRERKTATQKMFFYSNIMNMFKSKVKLADDQIVERPMIEVNDETGEIAWDKTKHITTVKKVLSYPQVNIVKKVEEQTIGQNGGLFDDNPKSPLEVIPSKLVPLKKALNPEKYGGYQKPTTAYPILLIVDTKQLIPISVMDKKRFEQNPVKFLKDKGYQQIEKNNFVKLPKYTLVDIGNGIKRLWASSKEVHKGNQLVVSKKSQDLLYHAHHLDNDYSNEYVKNHYQQFDILFNEITSFSKKCKLGKEHIQKIEEAYSKERDSASIEELADGFIKLLGFTQLGATSPFSFLGIKLNQKQYTGKKDYLLPCMEATLIHQSITGLYETRIDLSKLGGD

SEQ ID NO: 678 - protein, 1345 aa, Streptococcus mutans; identical to SEQ ID NO: 675

SEQ ID NO: 679 - protein, 1350 aa, Streptococcus mutans; identical to SEQ ID NO: 676

SEQ ID NO: 680 - protein, 1350 aa, Streptococcus mutans; identical to SEQ ID NO: 677

SEQ ID NO: 681 - protein, 1345 aa, Streptococcus mutans
MKKPYSIGLDIGTNSVGWAVVTDDYKVPAKKMKVLGNTDKSHIKKNLLGALLFDSGNTAADRRLKRTARRRYTRRRNRILYLQEIFAEEMSKVDDSFFHRLEDSFLVTEDKRGERHPIFGNLEEEVKYHENFPTIYHLRQYLADNPEKVDLRLVYLALAHIIKFRGHFLIEGKFDTRNNDVQRLFQEFLAVYDNTFENSSLQEQNVQVEEILTDKISKSAKKDRVLKLFPNEKSNGRFAEFLKLIVGNQADFKKHFELEEKAPLQFSKDTYEEELEVLLTQIGDNYAELFLSAKKLYDSILLSGILTVTDVSTKAPLSASMIQRYNEHQMDLAQLKQFIRQKLSDKYNEVFSDVSKDGYAGYIDGKTNQEAFYKYLKGLLNKIEGSGYFLDKIEREDFLRKQRTFDNGSIPHQIHLQEMRAIIRRQAEFYPFLADNQDRIEKILTFRIPYYVGPLARGKSDFAWLSRKSADKITPWNFDEIVDKESSAEAFINRMTNYDLYLPNQKVLPKHSLLYEKFTVYNELTKVKYKTEQGKTAFFDANMKQEIFDGVFKVYRKVTKDKLMDFLEKEFDEFRIVDLTGLDKENKAFNASYGTYHDLRKILDKDFLDNSKNEKILEDIVLTLTLFEDREMIRKRLENYSDLLTKEQVKKLERRHYTGWGRLSAELIHGIRNKESRKTLLDYLIDDGNSNRNFMQLINDDALSFKEEIAKAQVIGETDNLNQVVSDIAGSPAIKKGILQSLKIVDELVKIMGHQPENIVVEMARENQFTNQGRRNSQQRLKGLTDSIKEFGSQILKEHPVENSQLQNDRLFLYYLQNGRDMYTGEELDIDYLSQYDIDHIIPQAFIKDNSIDNRVLTSSKENRGKSDDVPSKDVVRKMKPYWSKLLSAKLITQRKFDNLTKAERGGLTDDDKAGFIKRQLVETRQITKHVARILDERFNTETDENNKKIRQVKIVTLKSNLVSNFRKEFELYKVREINDYHHAHDAYLNAVIGKALLGVYPQLEPEFVYGDYPHFHGHEENKATAKKFFYSNIMNFFKKDDVRTDKNGEIIWKKDEHISNIKKVLSYPQVNIVKKVEEQTGGFSKESILPKGNSDKLIPRKTKKFYWDTKKYGGFDSPIVAYSILVIADIEKGKSKKLKTVKALVGVTIMEKMTFERDPVAFLERKGYRNVQEENIIKLPKYSLFKLENGRKRLLASARELQKGNEIVLPNHLGTLLYHAKNIHKVDEPKHLDYVDKHKDEFKELLDVVSNFSKKYTLAEGNLEKIKELYAQNNGEDLKELSSSFINLLTFTAIGAPAAFKFFDKNIDRKRYTSTTEILNATLIHQSITGLYETRIDLSKLGGD

SEQ ID NO: 682 - protein, 1345 aa, Streptococcus mutans
MKKPYSIGLDIGTNSVGWAVVTDDYKVPAKKMKVLGNTDKSHIKKNLLGALLFDSGNTAADRRLKRTARRRYTRRRNRILYLQEIFAEEMSKVDDSFFHRLEDSFLVTEDKRGERHPIFGNLEEEVKYHENFPTIYHLRQYLADNPEKVDLRLVYLALAHIIKFRGHFLIEGKFDTRNNDVQRLFQEFLAVYDNTFENSSLQEQNVQVEEILTDKISKSAKKDRVLKLFPNEKSNGRFAEFLKLIVGNQADFKKHFELEEKAPLQFSKDTYEEELEVLLAQIGDNYAELFLSAKKLYDSILLSGILTVTDVSTKAPLSASMIQRYNEHQMDLAQLKQFIRQKLSDKYNEVFSDVSKDGYAGYIDGKTNQEAFYKYLKGLLNKIEGSGYFLDKIEREDFLRKQRTFDNGSIPHQIHLQEMRAIIRRQAEFYPFLADNQDRIEKILTFRIPYYVGPLARGKSDFAWLSRKSADKITPWNFDEIVDKESSAEAFINRMTNYDLYLPNQKVLPKHSLLYEKFTVYNELTKVKYKTEQGKTAFFDANMKQEIFDGVFKVYRKVTKDKLMDFLEKEFDEFRIVDLTGLDKENKAFNASYGTYHDLRKILDKDFLDNSKNEKILEDIVLTLTLFEDREMIRKRLENYSDLLTKEQVKKLERRHYTGWGRLSAELIHGIRNKESRKTILDYLIDDGNSNRNFMQLINDDALSFKEEIAKAQVIGETDNLNQVVSDIAGSPAIKKGILQSLKIVDELVKIMGHQPENIVVEMARENQFTNQGRRNSQQRLKGLTDSIKEFGSQILKEHPVEHSQLQNDRLFLYYLQNGRDMYTGEELDIDYLSQYDIDHIIPQAFIKDNSIDNRVLTSSKENRGKSDDVPSKNVVRKMKSYWSKLLSAKLITQRKFDNLTKAERGGLTDDDKAGFIKRQLVETRQITKHVARILDERFHTETDENNKKIRQVKIVTLKSNLVSNFRKEFELYKVREINDYHHAHDAYLNAVIGKALLGVYPQLEPEFVYGDYPHFHGHKENKATAKKFFYSNIMNFFKKDDVRTDKNGEIIWKKDEHISNIKKVLSYPQVNIVKKVEEQTGGFSKESILPKGNSDKLIPRKTKKFYWDTKKYGGFDSPIVAYSILVIADIEKGKSKKLKTVKALVGVTIMEKMTFERDPVAFLERKGYRNVQEENIIKLPKYSLFKLENGRKRLLASARELQKGNEIVLPNHLGTLLYHAKNIHKVDEPKHLDYVDKHKDEFKELLDVVSNFSKKYTLAEGNLEKIKELYAQNNGEDLKELASSFINLLTFTAIGAPATFKFFDKNIDRKRYTSTTEILNATLIHQSITGLYETRIDLSKLGGD

SEQ ID NO: 683 - protein, 1345 aa, Streptococcus mutans
MKKPYSIGLDIGTNSVGWAVVTDDYKVPAKKMKVLGNTDKSHIKKNLLGALLFDSGNTAADRRLKRTARRRYTRRRNRILYLQEIFAEEMSKVDDSFFHRLEDSFLVTEDKRGERHPIFGNLEEEVKYHENFPTIYHLRQYLADNPEKVDLRLVYLALAHIIKFRGHFLIEGKFDTRNNDVQRLFQEFLAVYDNTFENSSLQEQNVQVEEILTDKISKSAKKDRVLKLFPNEKSNGRFAEFLKLIVGNQADFKKHFELEEKAPLQFSKDTYEEELEVLLAQIGDNYAELFLSAKKLYDSILLSGILTVTDVSTKAPLSASMIQRYNEHQMDLAQLKQFIRQKLSDKYNEVFSDVSKDGYAGYIDGKTNQEAFYKYLKGLLNKIEGSGYFLDKIEREDFLRKQRTFDNGSIPHQIHLQEMRAIIRRQAEFYPFLADNQDRIEKILTFRIPYYVGPLARGKSDFAWLSRKSADKITPWNFDEIVDKESSAEAFINRMTNYDLYLPNQKVLPKHSLLYEKFTVYNELTKVKYKTEQGKTAFFDANMKQEIFDGVFKVYRKVTKDKLMDFLEKEFDEFRIVDLTGLDKENKVFNASYGTYHDLCKILDKDFLDNSKNEKILEDIVLTLTLFEDREMIRKRLENYSDLLTKEQVKKLERRHYTGWGRLSAELIHGIRNKESRKTILDYLIDDGNSNRNFMQLINDDALSFKEEIAKAQVIGETDNLNQVVSDIAGSPAIKKGILQSLKIVDELVKIMGHQPENIVVEMARENQFTKQGRRNSQQRLKGLTDSIKEFGSQILKEHPVENSQLQNDRLFLYYLQNGRDMYTGEELDIDYLSQYDIDHIIPQAFIKDNSIDNRVLTSSKENRGKSDDVPSKDVVRKMKSYWSKLLSAKLITQRKFDNLTKAERGGLTDDDKAGFIKRQLVETRQITKHVARILDERFYTETDENNKKIRQVKIVTLKSNLVSNFRKEFELYKVREINDYHHAHDAYLNAVIGKALLGVYPQLEPEFVYGDYPHFHGHKENKATAKKFFYSNIMNFFKKDDVRTDKNGEIIWKKDEHISNIKKVLSYPQVNIVKKVEEQTGGFSKESILPKGNSDKLIPRKTKKFYWDTKKYGGFDSPIVAYSILVIADIEKGKSKKLKTVKALVGVTIMEKMTFERDPVAFLERKGYRNVQEENIIKLPKYSLFKLENGRKRLLASARELQKGNEIVLPNHLGTLLYHAKNIHKVDEPKHLDYVDKHKDEFKELLDVVSNFSKKYTLAEGNLEKIKELYAQNNGEDLKELASSFINLLTFTAIGAPATFKFFDKNIDRKRYTSTTEILNATLIHQSITGLYETRIDLSKLGGD

SEQ ID NO: 684 - protein, 1345 aa, Streptococcus mutans
MKKPYSIGLDIGTNSVGWAVVTDDYKVPAKKMKVLGNTDKSHIKKNLLGALLFDSGNTAADRRLKRTARRRYTRRRNRILYLQEIFAEEMSKVDDSFFHRLEDSFLVTEDKRGERHPIFGNLEEEVKYHENFPTIYHLRQYLADNPEKVDLRLVYLALAHIIKFRGHFLIEGKFDTRNNDVQRLFQEFLAVYDNTFENSSLQEQNVQVEEILTDKISKSAKKDRVLKLFPNEKSNGRFAEFLKLIVGNQADFKKHFELEEKAPLQFSKDTYEEELEVLLAQIGDNYAELFLSAKKLYDSILLSGILTVTDVSTKAPLSASMIQRYNEHQMDLAQLKQFIRQKLSDKYNEVFSDVSKDGYAGYIDGKTNQEAFYKYLKGLLNKIEGSGYFLDKIEREDFLRKQRTFDNGSIPHQIHLQEMRAIIRRQAEFYPFLADNQDRIEKILTFRIPYYVGPLARGKSDFAWLSRKSADKITPWNFDEIVDKESSAEAFINRMTNYDLYLPNQKVLPKHSLLYEKFTVYNELTKVKYKTEQGKTAFFDANMKQEIFDGVFKVYRKVTKDKLMDFLEKEFDEFRIVDLTGLDKENKAFNASYGTYHDLRKILDKDFLDNSKNEKILEDIVLTLTLFEDREMIRKRLENYSDLLTKEQVKKLERRHYTGWGRLSAELIHGIRNKESRKTILDYLIDDGNSNRNFMQLINDDALSFKEEIAKAQVIGETDNLNQVVSDIAGSPAIKKGILQSLKIVDELVKIMGHQPENIVVEMARENQFTNQGRRNSQQRLKGLTDSIKEFGSQILKEHPVENSQLQNDRLFLYYLQNGRDMYTGEELDIDYLSQYDIDHIIPQAFIKDNSIDNRVLTSSKENRGKSDDVPSKNVVRKMKSYWSKLLSAKLITQRKFDNLTKAERGGLTDDDKAGFIKRQLVETRQITKHVARILDERFHTETDENNKKIRQVKIVTLKSNLVSNFRKEFELYKVREINDYHHAHDAYLNAVIGKALLGVYPQLEPEFVYGDYPHFHGHKENKATAKKFFYSNIMNFFKKDDVRTDKNGEIIWKKDEHISNIKKVLSYPQVNIVKKVEEQTGGFSKESILPKGNSDKLIPRKTKKFYWDTKKYGGFDSPIVAYSILVIADIEKGKSKKLKTVKALVGVTIMEKMTFERDPVAFLERKGYRNVQEENIIKLPKYSLFKLENGRKRLLASARELQKGNEIVLPNHLGTLLYHAKNIHKVDEPKHLDYVDKHKDEFKELLDVVSNFSKKYTLAEGNLEKIKELYAQNNGEDLKELSSSFINLLTFTAIGAPAAFKFFDKNIDRKRYTSTTEILNATLIHQSITGLYETRIDLSKLGGD

SEQ ID NO: 685 - protein, 1345 aa, Streptococcus mutans; identical to SEQ ID NO: 681

SEQ ID NO: 686 - protein, 1345 aa, Streptococcus mutans; identical to SEQ ID NO: 682

SEQ ID NO: 687 - protein, 1345 aa, Streptococcus mutans; identical to SEQ ID NO: 683

SEQ ID NO: 688 - protein, 1345 aa, Streptococcus mutans; identical to SEQ ID NO: 684

SEQ ID NO: 689 - protein, 1345 aa, Streptococcus mutans; identical to SEQ ID NO: 682

SEQ ID NO: 690 - protein, 1345 aa, Streptococcus mutans; identical to SEQ ID NO: 682

SEQ ID NO: 691 - protein, 1345 aa, Streptococcus mutans; identical to SEQ ID NO: 682

SEQ ID NO: 692 - protein, 1345 aa, Streptococcus mutans; identical to SEQ ID NO: 682

SEQ ID NO: 693 - protein, 1359 aa, Streptococcus mutans
MKKPYSIGLDIGTNSVGWAVVTDDYKVPAKKMKVLGNTDKSHIKKNLLGALLFDSGNTAEDRRLKRTARRRYTRRRNRILYLQEIFAEEMMQVDESFFQRLDDSFLVEEDKRGSRYPIFGTLKEEKKYHKEFKTIYHLREKLANSTEKADLRLVYLSLAHMIKFRGHFLIEGQLKAENTNVQALFKDFVEVYDKTVEESHLSEMTVDALSILTEKVSKSRRLENLVECYPTEKKNTLFGNLIALSLGLQPNFKTNFQLSEDAKLQFSKDTYEEDLEGLLGEIGDEYADLFASAKNLYDAILLSGILAVDDNTTKAPLSASMVKRYKEHKEELAAFKRFIKEKLPKKYEEIFKDDTKNGYAGYVGADKKLRKRSGKLATEEEFYKYVKGILNKVEGADVWLDKIDREDFLRKQRTFDNGSIPHQIHLQEMHAILRRQGEHYPFLKENQDKIEKILTFRIPYYVGPLVRKGSRFAWAEYKADEKITPWNFDDILDKEKSAEKFITRMTLNDLYLPEEKVLPKHSLLYETFTVYNELTKVKYVNEQGEAKFFDANMKQEIFDHVFKENRKVTKDKLLNYLNKEFEEFRIVNLTGLDKENKVFNSSLGTYHDLRKILNKSFLDNKENEQIIEDIIQTLTLFEDREMIRQRLQKYSDIFTKAQLKKLERRHYTGWGRLSYKLINGIRDKQSNKTILGYLIDDGYSNRNFMQLINDDALSFKEEIAKAQVIGEMDGLNQVVSDIAGSPAIKKGILQSLKIVDELVKVMGHNPANIVIEMARENQTTAKGRRSSQKRYKRLEEAIKNLDHDLNHKILKEHPTDNQALQNDRLFLYYLQNGRDMYTEDPLDINRLSDYDIDHIIPQAFIKDNSIDNRVLTRSDKNRGKSDDVPSEEVVHKMKPFWSKLLSAKLITQRKFDNLTKAERGGLTDDDKAGFIKRQLVETRQITKHVARILDERFNTETDENNKKIRQVKIVTLKSNLVSNFRKEFELYKVREINDYHHAHDAYLNAVIGKALLGVYPQLEPEFVYGDYPHFHGHKENKATAKKFFYSNIMNFFKKGDVRTDKNGEIIWKKDEHISNIKKVLSYPQVNIVKKVEEQTGGFSKESILPKGNSDKLIPRKTKKFYWDTKKYGGFDSPIVAYSILVIADIEKGKSKKLKTVKALVGVTIMEKMTFERDPVAFLERKGYRNVQEENIIKLPKYSLFKLENGRKRLLASARELQKGNEIVLPNHLETLLYHAKNIHKVDEPKHLDYVDKHKDEFKELLDVVSNFSKKYTLAEGNLEKIKELYAQNNGEDLKELASSFINLLTFTAIGAPAAFKFFDKNIDRKRYTSTTEILNATLIHQSITGLYETRIDLNKLGGD

SEQ ID NO: 694 - protein, 1359 aa, Streptococcus mutans; identical to SEQ ID NO: 693

SEQ ID NO: 695 - protein, 1355 aa, Streptococcus mutans
MKKPYSIGLDIGTNSVGWAVVTDDYKVPAKKMKVLGNTDKSHIKKNLLGALLFDSGNTAEDRRLKRTARRRYTRRRNRILYLQEIFAEEMSKVDDSFFHRLDESFLTDDDKNFDSHPIFGNKAEEDAYHQKFPTIYHLRKHLADSTEKADLRLVYLALAHMIKFRGHFLIEGELNAENTDVQKLFADFVGVYDRTFDDSHLSEITVDASSILTEKISKSRRLEKLINNYPKEKKNTLFGNLIALSLGLQPNFKTNFKLSEDAKLQFSKDTYEEDLEELLGKIGDDYADLFTLAKNLYDAILLSGILTADDSSTKAPLSASMIKRYAEHHEDLEKLKEFIKANKPELYHDIFKDETKNGYAGYIENGVKQDEFYKYLKNTLSKITGSDYFLDQIEREDFLRKQRTFDNGSIPHQIHLQEMHAILRRQGDYYPFLKENQDRIEKILTFRIPYYVGPLARKNSRFAWAEYHSDEAVTPWNFDQVIDKESSAQAFIEHMTNNDLYLPNEKVLPKHSPLYEKYTVYNELTKIKYVTEIGEAKFFDANLKQEIFDGLFKHERKVTKKKLRTFLDKNFDEFRIVDIQGLDKETETFNASYATYQDLLKVIKDKVFMDNPENAEILENIVLTLTLFEDREMIKQRLAKYADVFDKKVIDQLARRHYTGWGRLSAKLLNGIRDKQSCKTIMDYLIDDAQSNRNLMQLITDDNLTFKDDIVKAQYVDNSDDLHQVVQSLAGSPAIKKGILQSLKIVDELVKVMGKEPEQIVVEMARENQTTAKGRRNSQQRYKRLKEAIKSLDRDLNHKILKEHPTDNQALQNNRLFLYYLQNGRDMYTGESLDINRLSDYDIDHVIPQAFIKDNSIDNRVLTSSKANRGKSDDVPSEDVVNRMRPFWNKLLSSGLISQRKYNNLTKKELTLDDKAGFIKRQLVETRQITKHVARMLDERFNKEFDDNNKRIRRVKIVTLKSNLVSSFRKEFELYKVREINDYHHAHDAYLNAVVVKALLVKYPKLEPEFVYGEYPKYNSYRERKTATQKMFFYSNIMNMFKSKVKLADDQIVERPMIEVNDETGEIAWDKTKHITTVKKVLSYPQVNIVKKVEEQTIGQNGGLFDDNPKSPLEVIPSKLVPLKKALNPEKYGGYQKPTTAYPILLIVDTKQLIPISVMDKKRFEQNPVKFLKDKGYQQIEKNNFVKLPKYTLVDIGNGIKRLWASSKEVHKGNQLVVSKKSQDLLYHAHHLDNDYSNEYVKNHYQQFDILFNEITSFSKKCKLGKEHIQKIEEAYSKERDFASIEELADGFIKLLGFTQLGATSPFSFLGIKLNQKQYTGKKDYLLPCMEATLIHQSITGLYETRIDLSKLGGD

SEQ ID NO: 696 - protein, 1355 aa, Streptococcus mutans; identical to SEQ ID NO: 695

SEQ ID NO: 697 - protein, 1345 aa, Streptococcus mutans
MKKPYSIGLDIGTNSVGWAVVTDDYKVPAKKMKVLGNTDKSHIKKNLLGALLFDSGNTAEDRRLKRTARRRYTRRRNRILYLQEIFSEEMDKVDDSFFHRLEDSFLVTEDKRGERHPIFGNLEEEVKYHENFPTIYHLRQYLADNPEKVDLRLVYLALAHIIKFRGHFLIEGKFDTRNNDVQRLFQEFLAVYDNTFENSSLQEQNVQVEEILTDKISKSAKKDRVLKLFPNEKSNGRFAEFLKLIVGNQADFKKHFELEEKAPLQFSKDTYEEELEVLLAQIGDNYAELFLSAKKLYDSILLSGILTVTDVSTKAPLSASMIQRYNEHQMDLAQLKQFIRQKLSDKYNEVFSDVSKDGYAGYIDGKTNQEAFYKYLKGLLNKIEGSGYFLDKIEREDFLRKQRTFDNGSIPHQIHLQEMRAIIRRQAEFYPFLADNQDRIEKILTFRIPYYVGPLARGKSDFAWLSRKSADKITPWNFDEIVDKESSAEAFINRMTNYDLYLPNQKVLPKHSLLYEKFTVYNELTKVKYKTEQGKTAFFDANMKQEIFDGVFKVYRKVTKDKLMDFLEKEFDEFRIVDLTGLDKENKVFNASYGTYHDLCKILDKDFLDNSKNEKILEDIVLTLTLFEDREMIRKRLENYSDLLTKEQVKKLERRHYTGWGRLSAELIHGIRNKESRKTILDYLIDDGNSNRNFMQLINDDALSFKEEIAKAQVIGETDNLNQVVSDIAGSPAIKKGILQSLKIVDELVKIMGHQPENIVVEMARENQFTKQGRRNSQQRLKGLTDSIKEFGSQILKEHPVENSQLQNDRLFLYYLQNGRDMYTGEELDIDYLSQYDIDHIIPQAFIKDNSIDNRVLTSSKENRGKSDDVPSKDVVRKMKSYWSKLLSAKLITQRKFDNLTKAERGGLTDDDKAGFIKRQLVETRQITKHVARILDERFYTETDENNKKIRQVKIVTLKSNLVSNFRKEFELYKVREINDYHHAHDAYLNAVIGKALLGVYPQLEPEFVYGDYPHFHGHKENKATAKKFFYSNIMNFFKKDDVRTDKNGEIIWKKDEHISNIKKVLSYPQVNIVKKVEEQTGGFSKESILPKGNSDKLIPRKTKKFYWDTKKYGGFDSPIVAYSILVIADIEKGKSKKLKTVKALVGVTIMEKMTFERDPVAFLERKGYRNVQEENIIKLPKYSLFKLENGRKRLLASARELQKGNEIVLPNHLGTLLYHAKNIHKVDEPKHLDYVDKHKDEFKELLDVVSNFSKKYTLAEGNLEKIKELYAQNNGEDLKELASSFINLLTFTAIGAPATFKFFDKNIDRKRYTSTTEILNATLIHQSITGLYETRIDLSKLGGD

SEQ ID NO: 698 - protein, 1345 aa, Streptococcus mutans; identical to SEQ ID NO: 697

SEQ ID NO: 699 - protein, 1345 aa, Streptococcus mutans
MKKPYSIGLDIGTNSVGWAVVTDDYKVPAKKMKVLGNTDKSHIKKNLLGALLFDSGNTAEDRRLKRTARRRYTRRRNRILYLQEIFSEEMGKVDDSFFHRLDESFLTDDDKNFDSHPIFGNKAEEDAYHQKFPTIYHLRKHLADSTEKADLRLVYLALAHMIKFRGHFLIEGELNAENTDVQKLFADFVGVYDRTFDDSHLSEITVDASSILTEKISKSRRLEKLINNYPKEKKNTLFGNLIALSLGLQPNFKTNFKLSEDAKLQFSKDTYEEELEVLLAQIGDNYAELFLSAKKLYDSILLSGILTVTDVSTKAPLSASMIQRYNEHQMDLAQLKQFIRQKLSDKYNEVFSDVSKDGYAGYIDGKTNQEAFYKYLKGLLNKIEGSGYFLDKIEREDFLRKQRTFDNGSIPHQIHLQEMRAIIRRQAEFYPFLADNQDRIEKILTFRIPYYVGPLARGKSDFAWLSRKSADKITPWNFDEIVDKESSVEAFINRMTNYDLYLPNQKVLPKHSLLYEKFTVYNELTKVKYKTEQGKTAFFDANMKQEIFDGVFKVYRKVTKDKLMDFLEKEFDEFRIVDLTGLDKENKAFNASYGTYHDLRKILDKDFLDNSKNEKILEDIVLTLTLFEDREMIRKRLKNYSDLLTKEQLKKLERRHYTGWGRLSAELIHGIRNKESRKTILDYLIDDGNSNRNFMQLINDDALSFKEEIAKAQVIGETDNLNQVVSDIAGSPAIKKGILQSLKIVDELVKIMGHQPENIVVEMARENQFTNQGRRNSQQRLKGLTDSIKEFGSQILKEHPVENSQLQNDRLFLYYLQNGRDMYTGEELDIDYLSQYDIDHIIPQAFIKDNSIDNRVLTSSKENRGKSDDVPSKDVVRKMKSYWSKLLSAKLITQRKFDNLTKGERGGLTDDDKAGFIKRQLVETRQITKHVARILDERFNTETDENNKKIRQVKIVTLKSNLVSNFRKEFELYKVREINDYHHAHDAYLNAVIGKALLGVYPQLEPEFVYGDYPHFHGHKENKATAKKFFYSNIMNFFKKDDVRTDKNGEIIWKKDEYISNIKKVLSYPQVNIVKKVEEQTGGFSKESILPKGDSDKLIPRKTKKFYWDTKKYGGFDSPIVAYSILVIADIEKGKSKKLKTVKALVGVTIMEKMTFERDPVAFLERKGYRNVQEENIIKLPKYSLFKLENGRKRLLASARELQKGNEIVLPNHLGTLLYHAKNIHKVDEPKHLDYVDKHKDEFKELLDVVSNFSKKYTLAEGNLEKIKELYAQNNGEDLKELASSFINLLTFTAIGAPATFKFFDKNIDRKRYTSTTEILNATLIHQSITGLYETRIDLSKLGGD

SEQ ID NO: 700 - protein, 1345 aa, Streptococcus mutans
MKKPYSIGLDIGTNSVGWAVVTDDYKVPAKKMKVLGNTDKSHIKKNLLGALLFDSGNTAEDRRLKRTARRRYTRRRNRILYLQEIFSEEMGKVDDSFFHRLDESFLTDDDKNFDSYPIFGNKAEEDAYHQKFPTIYHLRKHLADSTEKADLRLVYLALAHMIKFRGHFLIEGELNAENTDVQKLFADFVGVYDRTFDDSHLSEITVDASSILTEKISKSRRLEKLINNYPKEKKNTLFRNLVALSLGLQPNFKTNFKLSEDAKLQFSKDTYEEDLEELLGKIGDDYADLFTLAKNLYDAILLSGILTADDSSTKAPLSASMIKRYAEHHEDLEKLKEFIKANKPELYHDIFKDETKNGYAGYIENGVKQDEFYKYLKNTLSKIAGSDYFLDKIEREDFLRKQRTFDNGSIPHQIHLQEMHAILRRQGDYYPFLKENQDRIEKILTFRIPYYVGPLARGKSDFAWLSRKSADKITPWNFDEIVDKESSVEAFINRMTNYDLYLPNQKVLPKHSLLYEKFTVYNELTKVKYKTEQGKTAFFDANMKQEIFDGVFKVYRKVTKDKLMDFLEKEFDEFRIVDLTGLDKENKAFNASYGTYHDLRKILDKDFLDNSKNEKILEDIVLTLTLFEDREMIRKRLKNYSDLLTKEQLKKLERRHYTGWGRLSAELIHGIRNKESRKTILDYLIDDGNSNRNFMQLINDDALSFKEEIAKAQVIGETDNLNQVVSDIAGSPAIKKGILQSLKIVDELVKIMGHQPENIVVEMARENQFTNQGRRNSQQRLKGLTDSIKEFGSQILKEHPVENSQLQNDRLFLYYLQNGRDMYTGEELDIDYLSQYDIDHIIPQAFIKDNSIDNRVLTSSKENRGKSDDVPSKDVVRKMKSYWSKLLSAKLITQRKFDNLTKGERGGLTDDDKAGFIKRQLVETRQITKHVARILDERFNTETDENNKKIRQVKIVTLKSNLVSNFRKEFELYKVREINDYHHAHDAYLNAVIGKALLGVYPQLEPEFVYGDYPHFHGHKENKATAKKFFYSNIMNFFKKDDVRTDKNGEIIWKKDEYISNIKKVLSYPQVNIVKKVEEQTGGFSKESILPKGDSDKLIPRKTKKFYWDTKKYGGFDSPIVAYSILVIADIEKGKSKKLKTVKALVGVTIMEKMTFERDPVAFLERKGYRNVQEENIIKLPKYSLFKLENGRKRLLASARELQKGNEIVLPNHLGTLLYHAKNIHKVDEPKHLDYVDKHKDEFKELLDVVSNFSKKYTLAEGNLEKIKELYAQNNGEDLKELASSFINLLTFTAIGAPATFKFFDKNIDRKRYTSTTEILNATLIHQSITGLYETRIDLSKLGGD

SEQ ID NO: 701 - protein, 1345 aa, Streptococcus mutans; identical to SEQ ID NO: 700

SEQ ID NO: 702 - protein, 1345 aa, Streptococcus mutans
MKKPYSIGLDIGTNSVGWAVVTDDYKVPAKKMKVLGNTDKSHIKKNLLGALLFDSGNTAEDRRLKRTARRRYTRRRNRILYLQEIFSEEMGKVDDSFFHRLEDSFLVTEDKRGERHPIFGNLEEEVKYHENFPTIYHLRQYLADNPEKTDLRLVYLALAHIIKFGGHFLIEGKFDTRNNDVQRLFQEFLAVYDNTFENSSLQEQNVQVEEILTDKISKSAKKDRVLKLFPNEKSNGRFAEFLKLIVGNQADFKKHFELEEKAPLQFSKDIYEEELEVLLAQIGDNYAELFLSAKKLYDSILLSGILTVTDVSTKAPLSASMIQRYNEHQMDLAQLKQFIRQKLSDKYNEVFSDVSKDGYAGYIDGKTNQEAFYKYLKGLLNKIEGSGYFLDKIEREDFLRKQRTFDNGSIPHQIHLQEMRAIIRRQAEFYPFLADNQDRIEKILTFRIPYYVGPLARGKSDFAWLSRKSADKITPWNFDEIVDKESSVEAFINRMTNYDLYLPNQKVLPKHSLLYEKFTVYNELTKVKYKTEQGKTAFFDANMKQEIFDGVFKVYRKVTKDKLMDFLEKEFDEFRIVDLTGLDKENKAFNASYGTYHDLRKILDKDFLDNSKNEKILEDIVLTLTLFEDREMIRKRLKNYSDLLTKEQLKKLERRHYTGWGRLSAELIHGIRNKESRKTILDYLIDDGNSNRNFMQLINDDALSFKEEIAKAQVIGETDNLNQVVSDIAGSPAIKKGILQSLKIVDELVKIMGHQPENIVVEMARENQFTNQGRRNSQQRLKGLTDSIKEFGSQILKEHPVENSQLQNDRLFLYYLQNGRDMYTGEELDIDYLSQYDIDHIIPQAFIKDNSIDNRVLTSSKENRGKSDDVPSKNVVRKMKSYWSKLLSAKLITQRKFDNLTKAERGGLTDDDKAGFIKRQLVETRQITKHVARILDERFHTETDENNKKIRQVKIVTLKSNLVSNFRKEFELYKVREINDYHHAHDAYLNAVIGKALLGVYPQLEPEFVYGDYPHFHGHKENKATAKKFFYSNIMNFFKKDDVRTDKNGEIIWKKDEHISNIKKVLSYPQVNIVKKVEEQTGGFSKESILPKGNSDKLIPRKTKKFYWDTKKYGGFDSPIVAYSILVIADIEKGKSKKLKTVKALVGVTIMEKMTFERDPVAFLERKGYRNVQEENIIKLPKYSLFKLENGRKRLLASARELQKGNEIVLPNHLGTLLYHAKNIHKVDEPKHLDYVDKHKDEFKELLDVVSNFSKKYTLAEGNLEKIKELYAQNNGEDLKELASSFINLLTFTAIGAPATFKFFDKNIDRKRYTSTTEILNATLIHQSITGLYETRIDLSKLGGD

SEQ ID NO: 703 - protein, 1345 aa, Streptococcus mutans; identical to SEQ ID NO: 702

SEQ ID NO: 704 - protein, 1345 aa, Streptococcus mutans
MKKPYSIGLDIGTNSVGWAVVTDDYKVPAKKMKVLGNTDKSHIKKNLLGALLFDSGNTAEDRRLKRTARRRYTRRRNRILYLQEIFSEEMGKVDDSFFHRLEDSFLVTEDKRGERHPIFGNLEEEVKYHENFPTIYHLRQYLADNPEKTDLRLVYLALAHIIKFRGHFLIEGKFDTRNNDVQRLFQEFLAVYDNTFENSSLQEQNVQVEEILTDKISKSAKKDRVLKLFPNEKSNGRFAEFLKLIVGNQADFKKHFELEEKAPLQFSKDIYEEELEVLLAQIGDNYAELFLSAKKLYDSILLSGILTVTDVSTKAPLSASMIQRYNEHQMDLAQLKQFIRQKLSDKYNEVFSDVSKDGYAGYIDGKTNQEAFYKYLKGLLNKIEGSGYFLDKIEREDFLRKQRTFDNGSIPHQIHLQEMRAIIRRQAEFYPFLADNQDRIEKILTFRIPYYVGPLARGKSDFAWLSRKSADKITPWNFDEIVDKESSVEAFINRMTNYDLYLPNQKVLPKHSLLYEKFTVYNELTKVKYKTEQGKTAFFDANMKQEIFDGVFKVYRKVTKDKLMDFLEKEFDEFRIVDLTGLDKENKAFNASYGTYHDLRKILDKDFLDNSKNEKILEDIVLTLTLFEDREMIRKRLKNYSDLLTKEQLKKLERRHYTGWGRLSAELIHGIRNKESRKTILDYLIDDGNSNRNFMQLINDDALSFKEEIAKAQVIGETDNLNQVVSDIAGSPAIKKGILQSLKIVDELVKIMGHQPENIVVEMARENQFTNQGRRNSQQRLKGLTDSIKEFGSQILKEHPVENSQLQNDRLFLYYLQNGRDMYTGEELDIDYLSQYDIDHIIPQAFIKDNSIDNRVLTSSKENRGKSDDVPSKNVVRKMKSYWSKLLSAKLITQRKFDNLTKAERGGLTDDDKAGFIKRQLVETRQITKHVARILDERFHTETDENNKKIRQVKIVTLKSNLVSNFRKEFELYKVREINDYHHAHDAYLNAVIGKALLGVYPQLEPEFVYGDYPHFHGHKENKATAKKFFYSNIMNFFKKDDVRTDKNGEIIWKKDEHISNIKKVLSYPQVNIVKKVEEQTGGFSKESILPKGNSDKLIPRKTKKFYWDTKKYGGFDSPIVAYSILVIADIEKGKSKKLKTVKALVGVTIMEKMTFERDPVAFLERKGYRNVQEENIIKLPKYSLFKLENGRKRLLASARELQKGNEIVLPNHLGTLLYHAKNIHKVDEPKHLDYVDKHKDEFKELLDVVSNFSKKYTLAEGNLEKIKELYAQNNGEDLKELASSFINLLTFTAIGAPATFKFFDKNIDRKRYTSTTEILNATLIHQSITGLYETRIDLSKLGGD

SEQ ID NO: 705 - protein, 1345 aa, Streptococcus mutans
MKKPYSIGLDIGTNSVGWAVVTDDYKVPAKKMKVLGNTDKSHIKKNLLGALLFDSGNTAEDRRLKRTARRRYTRRRNRILYLQEIFSEEMGKVDDSFFHRLEDSFLVTEDKRGERHPIFGNLEEEVKYHENFPTIYHLRQYLADNPEKTDLRLVYLALAHIIKFRGHFLIEGKFDTRNNDVQRLFQEFLAVYDNTFENSSLQEQNVQVEEILTDKISKSAKKDRVLKLFPNEKSNGRFAEFLKLIVGNQADFKKHFELEEKAPLQFSKDIYEEELEVLLAQIGDNYAELFLSAKKLYDSILLSGILTVTDVSTKAPLSASMIQRYNEHQMDLAQLKQFIRQKLSDKYNEVFSDVSKDGYAGYIDGKTNQEAFYKYLKGLLNKIEGSGYFLDKIEREDFLRKQRTFDNGSIPHQIHLQEMRAIIRRQAEFYPFLADNQDRIEKILTFRIPYYVGPLARGKSDFAWLSRKSADKITPWNFDEIVDKESSVEAFINRMTNYDLYLPNQKVLPKHSLLYEKFTVYNELTKVKYKTEQGKTAFFDANMKQEIFDGVFKVYRKVTKDKLMDFLEKEFDEFRIVDLTGLDKENKAFNASYGTYHDLRKILDKDFLDNSKNEKILEDIVLTLTLFEDREMIRKRLKNYSDLLTKEQLKKLERRHYTGWGRLSAELIHGIRNKESRKTILDYLIDDGNSNRNFMQLINDDALSFKEEIAKAQVIGETDNLNQVVSDIAGSPAIKKGILQSLKIVDELVKIMGHQPENIVVEMARENQFTNQGRRNSQQRLKGLTDSIKEFGSQILKEHPVENSQLQNDRLFLYYLQNGRDMYTGEELDIDYLSQYDIDHIIPQAFIKDNSIDNRVLTSSKENRGKSDDVPSKDVVRKMKSYWSKLLSAKLITQRKFDNLTKAERGGLTDDDKAGFIKRQLVETRQITKHVARILDERFNTETDENNKKIRQVKIVTLKSNLVSNFRKEFELYKVREINDYHHAHDAYLNAVIGKALLGVYPQLEPEFVYGDYPHFHGHKENKATAKKFFYSNIMNFFKKDDVRTDKNGEIIWKKDEHISNIKKVLSYPQVNIVKKVEEQTGGFSKESILPKGNSYKLIPRKTKKFYWDTKKYGGFDSPIVAYSILVIADIEKGKSKKLKTVKALVGVTIMEKMTFERDPVAFLERKGYRNVQEENIIKLPKYSLFKLENGRKRLLASARELQKGNEIVLPNHLGTLLYHAKNIHKVDEPKHLDYVDKHKDEFKELLDVVSNFSKKYTLAEGNLEKIKELYAQNNGEDLKELASSFINLLTFTAIGAPAAFKFFDKNIDRKRYTSTTEILNATLIHQSITGLYETRIDLSKLGGD

SEQ ID NO: 706 - protein, 1345 aa, Streptococcus mutans
MKKPYSIGLDIGTNSVGWAVVTDDYKVPAKKMKVLGNTDKSHIKKNLLGALLFDSGNTAEDRRLKRTARRRYTRRRNRILYLQEIFSEEMGKVDDSFFHRLEDSFLVTEDKRGERHPIFGNLEEEVKYHENFPTIYHLRQYLADNPEKTDLRLVYLALAHIIKFRGHFLIEGKFDTRNNDVQRLFQEFLAVYDNTFENSSLQEQNVQVEEILTDKISKSAKKDRVLKLFPNEKSNGRFAEFLKLIVGNQADFKKHFELEEKAPLQFSKDIYEEELEVLLAQIGDNYAELFLSAKKLYDSILLSGILTVTDVSTKAPLSASMIQRYNEHQMDLAQLKQFIRQKLSDKYNEVFSDVSKDGYAGYIDGKTNQEAFYKYLKGLLNKIEGSGYFLDKIEREDFLRKQRTFDNGSIPHQIHLQEMRAIIRRQAEFYPFLADNQDRIEKILTFRIPYYVGPLARGKSDFAWLSRKSADKITPWNFDEIVDKESSAEAFINRMTNYDLYLPNQKVLPKHSLLYEKFTVYNELTKVKYKTEQGKTAFFDANMKQEIFDGVFKVYRKVTKDKLMDFLEKEFDEFRIVDLTGLDKENKAFNASYGTYHDLRKILDKDFLDNSKNEKILEDIVLTLTLFEDREMIRKRLKNYSDLLTKEQLKKLERRHYTGWGRLSAELIHGIRNKESRKTILDYLIDDGNSNRNFMQLINDDALSFKEEIAKAQVIGETDNLNQVVSDIAGSLAIKKGILQSLKIVDELVKIMGHQPENIVVEMARENQFTNQGRRNSQQRLKGLTDSIKEFGSQILKEHPVENSQLQNDRLFLYYLQNGRDMYTGEELDIDYLSQYDIDHIIPQAFIKDNSIDNRVLTSSKENRGKSDDVPSKDVVRKMKSYWSKLLSAKLITQRKFDNLTKGERGGLTDDDKAGFIKRQLVETRQITKHVARILDERFNTETDENNKKIRQVKIVTLKSNLVSNFRKEFELYKVREINDYHHAHDAYLNAVIGKALLGVYPQLEPEFVYGDYPHFHGHKENKATAKKFFYSNIMNFFKKDDVRTDKNGEIIWKKDEYISNIKKVLSYPQVNIVKKVEEQTGGFFKESILPKGDSDKLIPRKTKKFYWDTKKYGGFDSPIVAYSILVIADIEKGKSKKLKTVKALVGVTIMEKMTFERDPVAFLERKGYRNVQEENIIKLPKYSLFKLENGRKRLLASARELQKGNEIVLPNHLGTLLYHAKNIHKVDEPKHLDYVDKHKDEFKELLDVVSNFSKKYTLAEGNLEKIKELYAQNNGEDLKELASSFINLLTFTAIGAPATFKFFDKNIDRKRYTSTTEILNATLIHQSITGLYETRIDLSKLGGD

SEQ ID NO: 707 - protein, 1345 aa, Streptococcus mutans
MKKPYSIGLDIGTNSVGWAVVTDDYKVPAKKMKVLGNTDKSHIKKNLLGALLFDSGNTAEDRRLKRTARRRYTRRRNRILYLQEIFSEEMGKVDDSFFHRLEDSFLVTEDKRGERHPIFGNLEEEVKYHENFPTIYHLRQYLADNPEKTDLRLVYLALAHIIKFRGHFLIEGKFDTRNNDVQRLFQEFLAVYDNTFENSSLQEQNVQVEEILTDKISKSAKKDRVLKLFPNEKSNGRFAEFLKLIVGNQADFKKHFELEEKAPLQFSKDIYEEELEVLLAQIGDNYAELFLSAKKLYDSILLSGILTVTDVSTKAPLSASMIQRYNEHQMDLAQLKQFIRQKLSDKYNEVFSDVSKDGYAGYIDGKTNQEAFYKYLKGLLNKIEGSGYFLDKIEREDFLRKQRTFDNGSIPHQIHLQEMRAIIRRQAEFYPFLADNQDRIEKILTFRIPYYVGPLARGKSDFAWLSRKSADKITPWNFDEIVDKESSVEAFINRMTNYDLYLPNQKVLPKHSLLYEKFTVYNELTKVKYKTEQGKTAFFDANMKQEIFDGVFKVYRKVTKDKLMDFLEKEFDEFRIVDLTGLDKENKAFNASYGTYHDLRKILDKDFLDNSKNEKILEDIVLTLTLFEDREMIRKRLKNYSDLLTKEQLKKLERRHYTGWGRLSAELIHGIRNKESRKTILDYLIDDGNSNRNFMQLINDDALSFKEEIAKAQVIGETDNLNQVVSDIAGSPAIKKGILQSLKIVDELVKIMGHQPENIVVEMARENQFTNQGRRNSQQRLKGLTDSIKEFGSQILKEHPVENSQLQNDRLFLYYLQNGRDMYTGEELDIDYLSQYDIDHIIPQAFIKDNSIDNRVLTSSKENRGKSDDVPSKDVVRKMKSYWSKLLSAKLITQRKFDNLTKAERGGLTDDDKAGFIKRQLVETRQITKHVARILDERFNTETDENNKKIRQVKIVTLKSNLVSNFRKEFELYKVREINDYHHAHDAYLNAVIGKALLGVYPQLEPEFVYGDYPHFHGHKENKATAKKFFYSNIMNFFKKDDVRTDKNGEIIWKKDEHISNIKKVLSYPQVNIVKKVEEQTGGFSKESILPKGNSDKLIPRKTKKFYWDTKKYGGFDSPIVAYSILVIADIEKGKSKKLKTVKALVGVTIMEKMTFERDPVAFLERKGYRNVQEENIIKLPKYSLFKLENGRKRLLASARELQKGNEIVLPNHLGTLLYHAKNIHKVDEPKHLDYVDKHKDEFKELLDVVSNFSKKYTLAEGNLEKIKELYAQNNGEDLKELASSFINLLTFTAIGAPATFKFFDKNIDRKRYTSTTEILNATLIHQSITGLYETRIDLNKLGGD

SEQ ID NO: 708 - protein, 1345 aa, Streptococcus mutans; identical to SEQ ID NO: 707

SEQ ID NO: 709 - protein, 1345 aa, Streptococcus mutans; identical to SEQ ID NO: 704

SEQ ID NO: 710 - protein, 1345 aa, Streptococcus mutans; identical to SEQ ID NO: 705

SEQ ID NO: 711 - protein, 1345 aa, Streptococcus mutans; identical to SEQ ID NO: 706

SEQ ID NO: 712 - protein, 1345 aa, Streptococcus mutans
MKKPYSIGLDIGTNSVGWAVVTDDYKVPAKKMKVLGNTDKSHIKKNLLGALLFDSGNTAEDRRLKRTARRRYTRRRNRILYLQEIFSEEMGKVDDSFFHRLEDSFLVTEDKRGERHPIFGNLEEEVKYHENFPTIYHLRQYLADNPEKVDLRLVYLALAHIIKFRGHFLIEGKFDTRNNDVQKLFQEFLAVYDNTFENSSLQEQNVQVEEILTDKISKSAKKDRVLKLFPNEKSNGRFAEFLKLIVGNQADFKKHFELEEKAPLQLSKDTYEEELEVLLAQIGDNYAELFLSAKKLYDSILLSGILTVTDVSTKAPLSASMIQRYNEHQMDLAQLKQFIRQKLSDKYNEVFSDVSKDGYAGYIDGKTNQEAFYKYLKGLLNKIEGSGYFLDKIEREDFLRKQRTFDNGSIPHQIHLQEMRAIIRRQAEFYPFLADNQDRIEKILTFRIPYYVGPLARGKSDFAWLSRKSADKITPWNFDEIVDKESSVEAFINRMTNYDLYLPNQKVLPKHSLLYEKFTVYNELTKVKYKTEQGKTAFFDANMKQEIFDGVFKVYRKVTKDKLMDFLEKEFDEFRIVDLTGLDKENKAFNASYGTYHDLRKILDKDFLDNSKNEKILEDIVLTLTLFEDREMIRKRLENYSDLLTKEQVKKLERRHYTGWGRLSAELIHGIRNKESRKTLLDYLIDDGNSNRNFMQLINDDALSFKEEIAKAQVIGETDNLNQVVSDIAGSPAIKKGILQSLKIVDELVKIMGHQPENIVVEMARENQFTNQGRRNSQQRLKGLTDSIKEFGSQILKEHPVENSQLQNDRLFLYYLQNGRDMYTGEELDIDYLSQYDIDHIIPQAFIKDNSIDNRVLTSSKENRGKSDDVPSKDVVRKMKSYWSKLLSAKLITQRKFDNLTKAERGGLTDDDKAGFIKRQLVETRQITKHVARILDERFNTETDENNKKIRQVKIVTLKSNLVSNFRKEFELYKVREINDYHHAHDAYLNAVIGKALLGVYPQLEPEFVYGDYPHFHGHKENKATAKKFFYSNIMNFFKKDDVRTDKNGEIIWKKDEYISNIKKVLSYPQVNIVKKVEEQTGGFSKESILPKGNSDKLIPRKTKKFYWDTKKYGGFDSPIVAYSILVIADIEKGKSKKLKTVKALVGVTIMEKMTFERDPIAFLERKGYRNVQEENIIKLPKYSLFKLENGRKRLLASARELQKGNEIVLPNHLGTLLYHAKNIHKVDEPKHLDYVDKHKDEFKELLDVVSNFSKKYTLAEGNLEKIKELYAQNNGEDLKELASSFINLLTFTAIGAPATFKFFDKNIDRKRYTSTTEILNATLIHQSITGLYETRIDLSKLGGD

SEQ ID NO: 713 - protein, 1345 aa, Streptococcus mutans; identical to SEQ ID NO: 712

SEQ ID NO: 714 - protein, 1345 aa, Streptococcus mutans
MKKPYSIGLDIGTNSVGWAVVTDDYKVPAKKMKVLGNTDKSHIKKNLLGALLFDSGNTAEDRRLKRTARRRYTRRRNRILYLQEIFSEEMGKVDDSFFHRLEDSFLVTEDKRGERHPIFGNLEEEVKYHENFPTIYHLRQYLADNPEKVDLRLVYLALAHIIKFRGHFLIEGKFDTRNNDVQRLFQEFLAVYDNTFENSSLQEQNVQVEEILTDKISKSAKKDRVLKLFPNEKSNGRFAEFLKLIVGNQADFKKHFELEEKAPLQFSKDTYEEDLEELLGKIGDDYADLFTLAKNLYDAILLSGILTADDSSTKAPLSASMIQRYNEHQMDLAQLKQFIRQKLSDKYNEVFSDVSKDGYAGYIDGKTNQEAFYKYLKGLLNKIEGSGYFLDKIEREDFLRKQRTFDNGSIPHQIHLQEMRAIIRRQAEFYPFLADNQDRIEKILTFRIPYYVGPLARGKSDFAWLSRKSADKITPWNFDEIVDKESSAEAFINRMTNYDLYLPNQKVLPKHSLLYEKFTVYNELTKVKYKTEQGKTAFFDANMKQEIFDGVFKVYRKVTKDKLMDFLEKEFDEFRIVDLTGLDKENKVFNASYGTYHDLCKILDKDFLDNSKNEKILEDIVLTLTLFEDREMIRKRLENYSDLLTKEQVKKLERRHYTGWGRLSAELIHGIRNKESRKTILDYLIDDGNSNRNFMQLINDDALSFKEEIAKAQVIGETDNLNQVVSDIAGSPAIKKGILQSLKIVDELVKIMGHQPENIVVEMARENQFTNQGRRNSQQRLKGLTDSIKEFGSQILKEHPVENSQLQNDRLFLYYLQNGRDMYTGEELDIDYLSQYDIDHIIPQAFIKDNSIDNRVLTSSKENRGKSDDVPSKDVVRKMKSYWSKLLSAKLITQRKFDNLTKAERGGLTDDDKAGFIKRQLVETRQITKHVARILDERFYTETDENNKKIRQVKIVTLKSNLVSNFRKEFELYKVREINDYHHAHDAYLNAVIGKALLGVYPQLEPEFVYGDYPHFHGHKENKATAKKFFYSNIMNFFKKDDVRTDKNGEIIWKKDEHISNIKKVLSYPQVNIVKKVEEQTGGFSKESILPKGNSDKLIPRKTKKFYWDTKKYGGFDSPIVAYSILVIADIEKGKSKKLKTVKALVGVTIMEKMTFERDPVAFLERKGYRNVQEENIIKLPKYSLFKLENGRKRLLASARELQKGNEIVLPNHLGTLLYHAKNIHKVDEPKHLDYVDKHKDEFKELLDVVSNFSKKYTLAEGNLEKIKELYAQNNGEDLKELASSFINLLTFTAIGAPATFKFFDKNIDRKRYTSTTEILNATLIHQSITGLYETRIDLSKLGGD

SEQ ID NO: 715 - protein, 1345 aa, Streptococcus mutans
MKKPYSIGLDIGTNSVGWAVVTDDYKVPAKKMKVLGNTDKSHIKKNLLGALLFDSGNTAEDRRLKRTARRRYTRRRNRILYLQEIFSEEMGKVDDSFFHRLEDSFLVTEDKRGERHPIFGNLEEEVKYHENFPTIYHLRQYLADNPEKVDLRLVYLALAHIIKFRGHFLIEGKFDTRNNDVQRLFQEFLAVYDNTFENSSLQEQNVQVEEILTDKISKSAKKDRVLKLFPNEKSNGRFAEFLKLIVGNQADFKKHFELEEKAPLQFSKDTYEEDLEELLGKIGDDYADLFTLAKNLYDAILLSGILTADDSSTKAPLSASMIQRYNEHQMDLAQLKQFIRQKLSDKYNEVFSDVSKDGYAGYIDGKTNQEAFYKYLKGLLNKIEGSGYFLDKIEREDFLRKQRTFDNGSIPHQIHLQEMRAIIRRQAEFYPFLADNQDRIEKILTFRIPYYVGPLARGKSDFAWLSRKSADKITPWNFDEIVDKESSAEAFINRMTNYDLYLPNQKVLPKHSLLYEKFTVYNELTKVKYKTEQGKTAFFDANMKQEIFDGVFKVYRKVTKDKLMDFLEKEFDEFRIVDLTGLDKENKVFNASYGTYHDLCKILDKDFLDNSKNEKILEDIVLTLTLFEDREMIRKRLENYSDLLTKEQVKKLERRHYTGWGRLSAELIHGIRNKESRKTILDYLIDDGNSNRNFMQLINDDALSFKEEIAKAQVIGETDNLNQVVSDIAGSPAIKKGILQSLKIVDELVKIMGHQPENIVVEMARENQFTNQGRRNSQQRLKGLTDSIKEFGSQILKEHPVENSQLQNDRLFLYYLQNGRDMYTGEELDIDYLSQYDIDHIIPQAFIKDNSIDNRVLTSSKENRGKSDDVPSKDVVRKMKPYWSKLLSAKLITQRKFDNLTKAERGGLTDDDKAGFIKRQLVETRQITKHVARILDERFNTETDENNKKIRQVKIVTLKSNLVSNFRKEFELYKVREINDYHHAHDAYLNAVIGKALLGVYPQLEPEFVYGDYPHFHGHEENKATAKKFFYSNIMNFFKKDDVRTDKNGEIIWKKDEHISNIKKVLSYPQVNIVKKVEEQTGGFSKESILPKGNSDKLIPRKTKKFYWDTKKYGGFDSPIVAYSILVIADIEKGKSKKLKTVKALVGVTIMEKMTFERDPVAFLERKGYRNVQEENIIKLPKYSLFKLENGRKRLLASARELQKGNEIVLPNHLGTLLYHAKNIHKVDEPKHLDYVDKHKDEFKELLDVVSNFSKKYTLAEGNLEKIKELYAQNNGEDLKELASSFINLLTFTAIGAPATFKFFDKNIDRKRYTSTTEILNATLIHQSITGLYETRIDLSKLGGD

SEQ ID NO: 716 - protein, 1345 aa, Streptococcus mutans
MKKPYSIGLDIGTNSVGWAVVTDDYKVPAKKMKVLGNTDKSHIKKNLLGALLFDSGNTAEDRRLKRTARRRYTRRRNRILYLQEIFSEEMGKVDDSFFHRLEDSFLVTEDKRGERHPIFGNLEEEVKYHENFPTIYHLRQYLADNPEKVDLRLVYLALAHIIKFRGHFLIEGKFDTRNNDVQRLFQEFLAVYDNTFENSSLQEQNVQVEEILTDKISKSAKKDRVLKLFPNEKSNGRFAEFLKLIVGNQADFKKHFELEEKAPLQFSKDTYEEELEVLLAQIGDNYAELFLSAKKLYDSILLSGILTVTDVSTKAPLSASMIQRYNEHQMDLAQLKQFIRQKLSDKYNEVFSDVSKDGYAGYIDGKTNQEAFYKYLKGLLNKIEGSGYFLDKIEREDFLRKQRTFDNGSIPHQIHLQEMRAIIRRQAEFYPFLADNQDRIEKILTFRIPYYVGPLARGKSDFAWLSRKSADKITPWNFDEIVDKESSAEAFINRMTNYDLYLPNQKVLPKHSLLYEKFTVYNELTKVKYKTEQGKTAFFDANMKQEIFDGVFKVYRKVTKDKLMDFLEKEFDEFRIVDLTGLDKENKVFNASYGTYHDLCKILDKDFLDNSKNEKILEDIVLTLTLFEDREMIRKRLENYSDLLTKEQVKKLERRHYTGWGRLSAELIHGIRNKESRKTILDYLIDDGNSNRNFMQLINDDALSFKEEIAKAQVIGETDNLNQVVSDIAGSPAIKKGILQSLKIVDELVKIMGHQPENIVVEMARENQFTKQGRRNSQQRLKGLTDSIKEFGSQILKEHPVENSQLQNDRLFLYYLQNGRDMYTGEELDIDYLSQYDIDHIIPQAFIKDNSIDNRVLTSSKENRGKSDDVPSKDVVRKMKSYWSKLLSAKLITQRKFDNLTKAERGGLTDDDKAGFIKRQLVETRQITKHVARILDERFYTETDENNKKIRQVKIVTLKSNLVSNFRKEFELYKVREINDYHHAHDAYLNAVIGKALLGVYPQLEPEFVYGDYPHFHGHKENKATAKKFFYSNIMNFFKKDDVRTDKNGEIIWKKDEHISNIKKVLSYPQVNIVKKVEEQTGGFSKESILPKGNSDKLIPRKTKKFYWDTKKYGGFDSPIVAYSILVIADIEKGKSKKLKTVKALVGVTIMEKMTFERDPVAFLERKGYRNVQEENIIKLPKYSLFKLENGRKRLLASARELQKGNEIVLPNHLGTLLYHAKNIHKVDEPKHLDYVDKHKDEFKELLDVVSNFSKKYTLAEGNLEKIKELYAQNNGEDLKELASSFINLLTFTAIGAPATFKFFDKNIDRKRYTSTTEILNATLIHQSITGLYETRIDLSKLGGD

SEQ ID NO: 717 - protein, 1345 aa, Streptococcus mutans
MKKPYSIGLDIGTNSVGWAVVTDDYKVPAKKMKVLGNTDKSHIKKNLLGALLFDSGNTAEDRRLKRTARRRYTRRRNRILYLQEIFSEEMGKVDDSFFHRLEDSFLVTEDKRGERHPIFGNLEEEVKYHENFPTIYHLRQYLADNPEKVDLRLVYLALAHIIKFRGHFLIEGKFDTRNNDVQRLFQEFLAVYDNTFENSSLQEQNVQVEEILTDKISKSAKKDRVLKLFPNEKSNGRFAEFLKLIVGNQADFKKHFELEEKAPLQFSKDTYEEELEVLLAQIGDNYAELFLSAKKLYDSILLSGILTVTDVSTKAPLSASMIQRYNEHQMDLAQLKQFIRQKLSDKYNEVFSDVSKDGYAGYIDGKTNQEAFYKYLKGLLNKIEGSGYFLDKIEREDFLRKQRTFDNGSIPHQIHLQEMRAIIRRQAEFYPFLADNQDRIEKILTFRIPYYVGPLARGKSDFAWLSRKSADKITPWNFDEIVDKESSAEAFINRMTNYDLYLPNQKVLPKHSLLYEKFTVYNELTKVKYKTEQGKTAFFDANMKQEIFDGVFKVYRKVTKDKLMDFLEKEFDEFRIVDLTGLDKENKVFNASYGTYHDLCKILDKDFLDNSKNEKILEDIVLTLTLFEDREMIRKRLENYSDLLTKEQVKKLERRHYTGWGRLSAELIHGIRNKESRKTILDYLIDDGNSNRNFMQLINDDALSFKEEIAKAQVIGETDNLNQVVSDIAGSPAIKKGILQSLKIVDELVKIMGHQPENIVVEMARENQFTKQGRRNSQQRLKGLTDSIKEFGSQILKEHPVENSQLQNDRLFLYYLQNGRDMYTGEELDIDYLSQYDIDHIIPQAFIKDNSIDNRVLTSSKENRGKSDDVPSKDVVRKMKSYWSKLLSAKLITQRKFDNLTKAERGGLTDDDKAGFIKRQLVETRQITKHVARILDERFYTETDENNKKIRQVKIVTLKSNLVSNFRKEFELYKVREINDYHHAHDAYLNAVIGKALLGVYPQLEPEFVYGDYPHFHGHKENKATAKKFFYSNIMNFFKKDDVRTDRNGEIIWKKDEHISNIKKVLSYPQVNIVKKVEEQTGGFSKESILPKGNSDKLIPRKTKKFYWDTKKYGGFDSPIVAYSILVIADIEKGKSKKLKTVKALVGVTIMEKMTFERDPVAFLERKGYRNVQEENIIKLPKYSLFKLENGRKRLLASARELQKGNEIVLPNHLGTLLYHAKNIHKVDEPKHLDYVDKHKDEFKELLDVVSNFSKKYTLAEGNLEKIKELYAQNNGEDLKELASSFINLLTFTAIGAPATFKFFDKNIDRKRYTSTTEILNATLIHQSITGLYETRIDLSKLGGD

SEQ ID NO: 718 - protein, 1345 aa, Streptococcus mutans
MKKPYSIGLDIGTNSVGWAVVTDDYKVPAKKMKVLGNTDKSHIKKNLLGALLFDSGNTAEDRRLKRTARRRYTRRRNRILYLQEIFSEEMGKVDDSFFHRLEDSFLVTEDKRGERHPIFGNLEEEVKYHENFPTIYHLRQYLADNPEKVDLRLVYLALAHIIKFRGHFLIEGKFDTRNNDVQRLFQEFLAVYDNTFENSSLQEQNVQVEEILTDKISKSAKKDRVLKLFPNEKSNGRFAEFLKLIVGNQADFKKHFELEEKAPLQFSKDTYEEELEVLLAQIGDNYAELFLSAKKLYDSILLSGILTVTDVSTKAPLSASMIQRYNEHQMDLAQLKQFIRQKLSDKYNEVFSDVSKDGYAGYIDGKTNQEAFYKYLKGLLNKIEGSGYFLDKIEREDFLRKQRTFDNGSIPHQIHLQEMRAIIRRQAEFYPFLADNQDRIEKILTFRIPYYVGPLARGKSDFAWLSRKSADKITPWNFDEIVDKESSAEAFINRMTNYDLYLPNQKVLPKHSLLYEKFTVYNELTKVKYKTEQGKTAFFDANMKQEIFDGVFKVYRKVTKDKLMDFLEKEFDEFRIVDLTGLDKENKVFNASYGTYHDLCKILDKDFLDNSKNEKILEDIVLTLTLFEDREMIRKRLENYSDLLTKEQVKKLERRHYTGWGRLSAELIHGIRNKESRKTILDYLIDDGNSNRNFMQLINDDALSFKEEIAKAQVIGETDNLNQVVSDIAGSPAIKKGILQSLKIVDELVKIMGHQPENIVVEMARENQFTNQGRQNSQQRLKGLTDSIKEFGSQILKEHPVENSQLQNDRLFLYYLQNGRDMYTGEELDIDYLSQYDIDHIIPQAFIKDNSIDNRVLTSSKENRGKSDDVPSEDVVRKMKSYWSKLLSAKLITQRKFDNLTKAERGGLTDDDKAGFIKRQLVETRQITKHVARILDERFYTETDENNKKIRQVKIVTLKSNLVSNFRKEFELYKVREINDYHHAHDAYLNAVIGKALLGVYPQLEPEFVYGDYPHFHGHKENKATAKKFFYSNIMNFFKKDDVRTDKNGEIIWKKDEHISNIKKVLSYPQVNIVKKVEEQTGGFSKESILPKGNSDKLIPRKTKKFYWDTKKYGGFDSPIVAYSILVIADIEKGKSKKLKTVKALVGVTIMEKMTFERDPVAFLERKGYRNVQEENIIKLPKYSLFKLENGRKRLLASARELQKGNEIVLPNHLGTLLYHAKNIHKVDEPKHLDYVDKHKDEFKELLDVVSNFSKKYTLAEGNLEKIKELYAQNNGEDLKELASSFINLLTFTAIGAPATFKFFDKNIDRKRYTSTTEILNATLIHQSITGLYETRIDLSKLGGD

SEQ ID NO: 719 - protein, 1345 aa, Streptococcus mutans; identical to SEQ ID NO: 718

SEQ ID NO: 720 - protein, 1345 aa, Streptococcus mutans; identical to SEQ ID NO: 714

SEQ ID NO: 721 - protein, 1345 aa, Streptococcus mutans; identical to SEQ ID NO: 715

SEQ ID NO: 722 - protein, 1345 aa, Streptococcus mutans; identical to SEQ ID NO: 716

SEQ ID NO: 723 - protein, 1345 aa, Streptococcus mutans; identical to SEQ ID NO: 717

SEQ ID NO: 724 - protein, 1345 aa, Streptococcus mutans; identical to SEQ ID NO: 716

SEQ ID NO: 725 - protein, 1345 aa, Streptococcus mutans; identical to SEQ ID NO: 716

SEQ ID NO: 726 - protein, 1345 aa, Streptococcus mutans; identical to SEQ ID NO: 716

SEQ ID NO: 727 - protein, 1345 aa, Streptococcus mutans; identical to SEQ ID NO: 717

SEQ ID NO: 728 - protein, 1345 aa, Streptococcus mutans
MKKPYSIGLDIGTNSVGWAVVTDDYKVPAKKMKVLGNTDKSHIKKNLLGALLFDSGNTAEDRRLKRTARRRYTRRRNRILYLQEIFSEEMGKVNDSFFHRLEDSFLVTEDKRGERHPIFGNLEEEVKYHENFPTIYHLRQYLADNPEKVDLRLVYLALAHIIKFRGHFLIEGKFDTRNNDVQRLFQEFLAVYDNTFENSSLQEQNVQVEEILTDKISKSAKKDRVLKLFPNEKSNGRFAEFLKLIVGNQADFKKHFELEEKAPLQFSKDTYEEELEVLLAQIGDNYAELFLSAKKLYDSILLSGILTVTDVSTKAPLSASMIQRYNEHQMDLAQLKQFIRQKLSDKYNEVFSDVSKDGYAGYIDGKTNQEAFYKYLKGLLNKIEGSGYFLDKIEREDFLRKQRTFDNGSIPHQIHLQEMRAIIRRQAEFYPFLADNQDRIEKILTFRIPYYVGPLARGKSDFAWLSRKSADKITPWNFDEIVDKESSAEAFINRMTNYDLYLPNQKVLPKHSLLYEKFTVYNELTKVKYKTEQGKTAFFDANMKQEIFDGVFKVYRKVTKDKLMDFLEKEFDEFRIVDLTGLDKENKVFNASYGTYHDLCKILDKDFLDNSKNEKILEDIVLTLTLFEDREMIRKRLENYSDLLTKEQVKKLERRHYTGWGRLSAELIHGIRNKESRKTILDYLIDDGNSNRNFMQLINDDALSFKEEIAKAQVIGETDNLNQVVSDIAGSPAIKKGILQSLKIVDELVKIMGHQPENIVVEMARENQFTKQGRRNSQQRLKGLTDSIKEFGSQILKEHPVENSQLQNDRLFLYYLQNGRDMYTGEELDIDYLSQYDIDHIIPQAFIKDNSIDNRVLTSSKENRGKSDDVPSKDVVRKMKSYWSKLLSAKLITQRKFDNLTKAERGGLTDDDKAGFIKRQLVETRQITKHVARILDERFYTETDENNKKIRQVKIVTLKSNLVSNFRKEFELYKVREINDYHHAHDAYLNAVIGKALLGVYPQLEPEFVYGDYPHFHGHKENKATAKKFFYSNIMNFFKKDDVRTDKNGEIIWKKDEYISNIKKVLSYPQVNIVKKVEEQTGGFSKESILPKGNSDKLIPRKTKKFYWDTKKYGGFDSPIVAYSILVIADIEKGKSKKLKTVKALVGVTIMEKMTFERDPIAFLERKGYRNVQEENIIKLPKYSLFKLENGRKRLLASARELQKGNEIVLPNHLGTLLYHAKNIHKVDEPKHLDYVDKHKDEFKELLDVVSNFSKKYTLAEGNLEKIKELYAQNNGEDLKELASSFINLLTFTAIGAPAAFKFFDKNIDRKRYTSTTEILNATLIHQSITGLYETRIDLSKLGGD

SEQ ID NO: 729 - protein, 1345 aa, Streptococcus mutans; identical to SEQ ID NO: 728

SEQ ID NO: 730 - protein, 1345 aa, Streptococcus mutans
MKKPYSIGLDIGTNSVGWAVVTDDYKVPAKKMKVLGNTDKSHIKKNLLGALLFDSGNTAEDRRLKRTTRRRYTRRRNRILYLQEIFSEEMGKVDDSFFHRLEDSFLVTEDKRGERHPIFGNLEEEVKYHENFPTIYHLRQYLADNPEKTDLRLVYLALAHIIKFRGHFLIEGKFDTRNNDVQRLFQEFLAVYDNTFENSSLQEQNVQVEEILTDKISKSAKKDRVLKLFPNEKSNGCFAEFLKLIVGNQADFKKHFELEEKAPLQFSKDTYEEELEVLLAQIGDNYAELFLSAKKLYDSILLSGILTVTDVSTKAPLSASMIQRYNEHQMDLTQLKQFIRQKLSDKYNEVFSDVSKDGYAGYIDGKTNQEAFYKYLKGLLNKIEGSGYFLDKIEREDFLRKQRTFDNGSIPHQIHLQEMRAIIRRQAEFYPFLADNQDRIEKLLTFRIPYYVGPLASGKSDFAWLSRKSADKITPWNFDEIVDKESSAEAFINRMTNYDLYLPNQKVLPKHSLLYEKFTVYNELTKVKYKTEQGKTAFFDANMKQEIFDGVFKVYRKVTKDKLMDFLEKEFDEFRIVDLTGLDKENKVFNASYGTYHDLCKILDKDFLDNSKNEKILEDIVLTLTLFEDREMIRKRLENYSDLLTKEQVKKLERRHYTGWGRLSAELIHGIRNKESRKTILDYLIDDGNSNRNFMQLINDDALSFKEEIAKAQVIGETDNLNQVVSDIAGSPAIKKGILQSLKIVDELVKIMGHQPENIVVEMARENQFTNQGRRNSQQRLKGLTDSIKEFGSQILKEHPVENSQLQNDRLFLYYLQNGRDMYTGEELDIDYLSQYDIDHIIPQAFIKDNSIDNRVLTSSKENRGKSDDVPSKDVVRKMKSYWSKLLSAKLITQRKFDNLTKAERGGLTDDDKAGFIKRQLVETRQITKHVARILDERFNTETDENNKKIRQVKIVTLKSNLVSNFRKEFELYKVREINDYHHAHDAYLNAVIGKALLGVYPQLEPEFVYGDYPHFHGHKENKATAKKFFYSNIMNFFKKDDVRTDKNGEIIWKKDEHISNIKKVLSYPQVNIVKKVEEQTGGFSKESILPKGNSDKLIPRKTKKFYWDTKKYGGFDSPIVAYSILVIADIEKGKSKKLKTVKALVGVTIMEKMTFERDPVAFLERKGYRNVQEENIIKLPKYSLFKLENGRKRLLASARELQKGNEIVLPNHLGTLLYHAKNIHKVDEPKHLDYVDKHKDEFKELLDVVSNFSKKYTLAEGNLEKIKELYAQNNGEDLKELASSFINLLTFTAIGAPATFKFFDKNIDRKRYTSTTEILNATLIHQSITGLYETRIDLSKLGGD

SEQ ID NO: 731 - protein, 1345 aa, Streptococcus mutans; identical to SEQ ID NO: 730

SEQ ID NO: 732 - protein, 1350 aa, Streptococcus mutans
MKKPYSIGLDIGTNSVGWAVVTDDYKVPAKKMTVLGNTDKSHIKKNLLGALLFDSGNTAADRRLKRTARRRYTRRRNRILYLQEIFAEEMSKVDDSFFHRLEDSFLVTEDKRGERHPIFGNLEEEVKYHENFPTIYHLRQYLADNPEKVDLRLVYLALAHIIKFRGHFLIEGKFDTRNNDVQRLFQEFLAVYDNTFENSSLQEQNVQVEEILTDKISKSAKKDRVLKLFPNEKSNGRFAEFLKLIVGNQADFKKHFELEEKTPLQFSKDTYEEELEVLLAQIGDNYAELFLSAKKLYDSILLSGILTVTDVSTKAPLSASMIQRYNEHQMDLAQLKQFIRQKLSDKYNEVFSDVSKDGYAGYIDGKTNQEAFYKYLKGLLNKIEGSGYFLDKIEREDFLRKQRTFDNGSIPHQIHLQEMRAIIRRQAEFYPFLADNQDRIEKILTFRIPYYVGPLARGKSDFAWLSRKSADKITPWNFDEIVDKESSAEAFINRMTNYDLYLPNQKVLPKHSLLYEKFTVYNELTKVKYKTEQGKTAFFDANMKQEIFDGVFKVYRKVTKDKLMDFLEKEFDEFRIVDLTGLDKENKAFNASYGTYHDLRKILDKDFLDNSKNEKILEDIVLTLTLFEDREMIRKRLENYSDLLTKEQVKKLERRHYTGWGRLSAELIHGIRNKESRKTILDYLIDDGNSNRNFMQLINDDALSFKEEIAKAQVIGETDNLNQVVSDIAGSPAIKKGILQSLKIVDELVKIMGHQPENIVVEMARENQFTNQGRRNSQQRLKGLTDSIKEFGSQILKEHPVENSQLQNDRLFLYYLQNGRDMYTGEELDIDYLSQYDIDHIIPQAFIKDNSIDNRVLTSSKENRGKSDDVPSEDVVNRMRPFWNKLLSSGLISQRKYNNLTKKELTPDDKAGFIKRQLVETRQITKHVARMLDERFNKEFDDNNKRIRRVKIVTLKSNLVSSFRKEFELYKVREINDYHHAHDAYLNAVVVKALLVKYPKLEPEFVYGEYPKYNSYRERKTATQKMFFYSNIMNMFKSKVKLADDQIVERPMIEVNDETGEIAWDKTKHITTVKKVLSYPQVNIVKKVEEQTIGQNGGLFDDNPKSPLEVIPSKLVPLKKALNPEKYGGYQKPTTAYPILLIVDTKQLIPISVMDKKRFEQNPVKFLKDKGYQQIEKNNFVKLPKYTLVDIGNGIKRLWASSKEVHKGNQLVVSKKSQDLLYHAHHLDNDYSNEYVKNHYQQFDILFNEITSFSKKCKLGKEHIQKIEEAYSKERDSASIEELADGFIKLLGFTQLGATSPFSFLGIKLNQKQYTGKKDYLLPCMEATLIHQSITGLYETRIDLSKLGGD

SEQ ID NO: 733 - protein, 1350 aa, Streptococcus mutans; identical to SEQ ID NO: 732

SEQ ID NO: 734 - protein, 1345 aa, Streptococcus mutans
MKKPYSIGLDIGTNSVGWAVVTDDYKVPDKKMKVLGNTDKSHIKKNLLGALLFDSGNTAEDRRLKRTARRRYTRRRNRILYLQEIFSEEMGKVDDSFFHRLEDSFLVTEDKRGERHPIFGNLEEEVKYHENFPTIYHLRQYLADNPEKTDLRLVYLALAHIIKFRGHFLIEGKFDTRNNDVQRLFQEFLAVYDNTFENSSLQEQNVQVEEILTDKISKSAKKDRVLKLFPNEKSNGRFAEFLKLIVGNQADFKKHFELEEKAPLQFSKDIYEEELEVLLAQIGDNYAELFLSAKKLYDSILLSGILTVTDVSTKAPLSASMIQRYNEHQMDLAQLKQFIRQKLSDKYNEVFSDVSKDGYAGYIDGKTNQEAFYKYLKGLLNKIEGSGYFLDKIEREDFLRKQRTFDNGSIPHQIHLQEMRAIIRRQAEFYPFLADNQDRIEKILTFRIPYYVGPLARGKSDFAWLSRKSADKITPWNFDEIVDKESSVEAFINRMTNYDLYLPNQKVLPKHSLLYEKFTVYNELTKVKYKTEQGKTAFFDANMKQEIFDGVFKVYRKVTKDKLMDFLEKEFDEFRIVDLTGLDKENKAFNASYGTYHDLRKILDKDFLDNSKNEKILEDIVLTLTLFEDREMIRKRLKNYSDLLTKEQLKKLERRHYTGWGRLSAELIHGIRNKESRKTILDYLIDDGNSNRNFMQLINDDALSFKEEIAKAQVIGETDNLNQVVSDIAGSPAIKKGILQSLKIVDELVKIMGHQPENIVVEMARENQFTNQGRRNSQQRLKGLTDSIKEFGSQILKEHPVENSQLQNDRLFLYYLQNGRDMYTGEELDIDYLSQYDIDHIIPQAFIKDNSIDNRVLTSSKENRGKSDDVPSKDVVRKMKSYWSKLLSAKLITQRKFDNLTKAERGGLTDDDKAGFIKRQLVETRQITKHVARILDERFYTETDENNKKIRQVKIVTLKSNLVSNFRKEFELYKVREINDYHHAHDAYLNAVIGKALLGVYPQLEPEFVYGDYPHFHGHKENKATAKKFFYSNIMNFFKKDDVRTDKNGEIIWKKDEHISNIKKVLSYPQVNIVKKVEEQTGGFSKESILPKGNSDKLIPRKTKKFYWDTKKYGGFDSPIVAYSILVIADIEKGKSKKLKTVKALVGVTIMEKMTFERDPVAFLERKGYRNVQEENIIKLPKYSLFKLENGRKRLLASARELQKGNEIVLPNHLGTLLYHAKNIHKVDEPKHLDYVDKHKDEFKELLDVVSNFSKKYTLAEGNLEKIKELYAQNNGEDLKELASSFINLLTFTAIGAPATFKFFDKNIDRKRYTSTTEILNATLIHQSITGLYETRIDLSKLGGD

SEQ ID NO: 735 - protein, 1345 aa, Streptococcus mutans
MKKPYSIGLDIGTNSVGWAVVTDDYKVSAKKMKVLGNTDKSHIKKNLLGALLFDSGNTAEDRRLKRTARRRYTRRRNRILYLQEIFAEEMSKVDDSFFHRLEDSFLVTEDKRGERHPIFGNLEEEVKYHENFPTIYHLRQYLADNPEKVDLRLVYLALAHIIKFRGHFLIEGKFDTRNNDVQRLFQEFLAVYDNTFENSSLQEQNVQVEEILTDKISKSAKKDRVLKLFPNEKSNGRFAEFLKLIVGNQADFKKHFELEEKAPLQFSKDTYEEELEVLLAQIGDNYAELFLSAKKLYDSILLSGILTVTDVSTKAPLSASMIQRYNEHQMDLAQLKQFIRQKLSDKYNEVFSDVSKDGYAGYIDGKTNQEAFYKYLKGLLNKIEGSGYFLDKIEREDFLRKQRTFDNGSIPHQIHLQEMRAIIRRQAEFYPFLADNQDRIEKILTFRIPYYVGPLARGKSDFAWLSRKSADKITPWNFDEIVDKESSAEAFINRMTNYDLYLPNQKVLPKHSLLYEKFTVYNELTKVKYKTEQGKTAFFDANMKQEIFDGVFKVYRKVTKDKLMDFLEKEFDEFRIVDLTGLDKENKAFNASYGTYHDLRKILDKDFLDNSKNEKILEDIVLTLTLFEDREMIRKRLENYSDLLTKEQVKKLERRHYTGWGRLSAELIHGIRNKESRKTILDYLIDDGNSNRNFMQLINDDALSFKEEIAKAQVIGETDNLNQVVSDIAGSPAIKKGILQSLKIVDELVKIMGHQPENIVVEMARENQFTNQGRRNSQQRLKGLTDSIKEFGSQILKEHPVEHSQLQNDRLFLYYLQNGRDMYTGEELDIDYLSQYDIDHIIPQAFIKDNSIDNRVLTSSKENRGKSDDVPSKNVVRKMKSYWSKLLSAKLITQRKFDNLTKAERGGLTDDDKAGFIKRQLVETRQITKHVARILDERFHTETDENNKKIRQVKIVTLKSNLVSNFRKEFELYKVREINDYHHTHDAYLNAVIGKALLGVYPQLEPEFVYGDYPHFHGHKENKATAKKFFYSNIMNFFKKDDVRTDKNGEIIWKKDEHISNIKKVLSYPQVNIVKKVEEQTGGFSKESILPKGNSDKLIPRKTKKFYWDTKKYGGFDSPIVAYSILVIADIEKGKSKKLKTVKALVGVTIMEKMTFERDPVAFLERKGYRNVQEENIIKLPKYSLFKLENGRKRLLASARELQKGNEIVLPNHLGTLLYHAKNIHKVDEPKHLDYVDKHKDEFKELLDVVSNFSKKYTLAEGNLEKIKELYAQNNGEDLKELASSFINLLTFTAIGAPATFKFFDKNIDRKRYTSTTEILNATLIHQSITGLYETRIDLSKLGGD

SEQ ID NO: 736 - protein, 1345 aa, Streptococcus mutans; identical to SEQ ID NO: 735

SEQ ID NO: 737 - protein, 1345 aa, Streptococcus mutans
MKKPYSIGLDIGTNSVGWSVVTDDYKVPAKKMKVLGNTDKSHIEKNLLGALLFDSGNTAEDRRLKRTARRRYTRRRNRILYLQEIFSEEMGKVDDSFFHRLEDSFLVTEDKRGERHPIFGNLEEEVKYHENFPTIYHLRQYLADNPEKVDLRLVYLALAHIIKFRGHFLIEGKFDTRNNDVQRLFQEFLAVYDNTFENSSLQEQNVQVEEILTDKISKSAKKDRVLKLFPNEKSNGRFAEFLKLIVGNQADFKKHFELEEKAPLQFSKDTYEEELEVLLAQIGDNYAELFLSAKKLYDSILLSGILTVTDVGTKAPLSASMIQRYNEHQMDLAQLKQFIRQKLSDKYNEVFSDVSKDGYAGYIDGKTNQEAFYKYLKGLLNKIEGSGYFLDKIEREDFLRKQRTFDNGSIPHQIHLQEMRAIIRRQAEFYPFLADNQDRIEKLLTFRIPYYVGPLARGKSDFAWLSRKSADKITPWNFDEIVDKESSAEAFINRMTNYDLYLPNQKVLPKHSLLYEKFTVYNELTKVKYKTEQGKTAFFDANMKQEIFDGVFKVYRKVTKDKLMDFLEKEFDEFRIVDLTGLDKENKVFNASYGTYHDLCKILDKDFLDNSKNEKILEDIVLTLTLFEDREMIRKRLENYSDLLTKEQVKKLERRHYTGWGRLSAELIHGIRNKESRKTILDYLIDDGNSNRNFMQLINDDALSFKEEIAKAQVIGETDNLNQVVSDIAGSPAIKKGILQSLKIVDELVKIMGHQPENIVVEMARENQFTNQGRRNSQQRLKGLTDSIKEFGSQILKEHPVENSQLQNDRLFLYYLQNGRDMYTGEELDIDYLSQYDIDHIIPQAFIKDNSIDNRVLTSSKENRGKSDDVPSKDVVRKMKSYWSKLLSAKLITQRKFDNLTKAERGGLTDDDKAGFIKRQLVETRQITKHVARILDERFNTETDENNKKIRQVKIVTLKSNLVSNFRKEFELYKVREINDYHHAHDAYLNAVIGKALLGVYPQLEPEFVYGDYPHFHGHKENKATAKKFFYSNIMNFFKKDDVRIDKNGEIIWKKDEHISNIKKVLSYPQVNIVKKVEEQTGGFSKESILPKGNSDKLIPRKTKKFYWDTKKYGGFDSPIVAYSILVIADIEKGKSKKLKTVKALVGVTIMEKMTFERDPVAFLERKGYRNVQEENIIKLPKYSLFKLENGRKRLLASARELQKGNEIVLPNHLGTLLYHAKNIHKVDEPKHLDYVDKHKDEFKELLDVVSNFSKKYTLAEGNLEKIKELYAQNNGEDLKELASSFINLLTFTAIGAPATFKFFDKNIDRKRYTSTTEILNATLIHQSITGLYETRIDLSKLGGD

SEQ ID NO: 738 - protein, 1345 aa, Streptococcus mutans; identical to SEQ ID NO: 737

SEQ ID NO: 739 - protein, 1355 aa, Streptococcus mutans
MKKSYSIGLDIGTNSVGWAVVTDDYKVPAKKMKVLGNTDKSHIKKNLLGALLFDSGNTAEDRRLKRTARRRYTRRRNRILYLQEIFSEEMGKVDDSFFHRLDESFLTDDDKNFDSHPIFGNKAEEDAYHQKFPTIYHLRKHLADSTEKADLRLVYLALAHMIKFRGHFLIEGELNAENTDVQKLFADFVGVYDRTFDDSHLSEITVDASSILTEKISKSRRLEKLINNYPKEKKNTLFGNLIALSLGLQPNFKTNFKLSEDAKLQFSKDTYEEDLEELLGKIGDDYADLFTLAKNLYDAILLSGILTADDSSTKAPLSASMIKRYAEHHEDLEKLKEFIKANKPELYHDIFKDETKNGYAGYIENGVKQDEFYKYLKNTLSKIAGSDYFLDKIEREDFLRKQRTFDNGSIPHQIHLQEMHAILRRQGDYYPFLKENQDRIEKILTFRIPYYVGPLARKNSRFAWAEYHSDEAVMPWNFDQVIDKESSAQAFIEHMTNNDLYLPNEKVLPKHSPLYEKYTVYNELTKIKYVTEIGEAKFFDANLKQEIFDGLFKHERKVTKKKLRTFLDKNFDEFRIVDIQGLDKETETFNASYATYQDLLKVIKDKVFMDNPENAEILENIVLTLTLFEDREMIKQRLAKYADVFDKKVIDQLARRHYTGWGRLSAKLLNGIRDKQSCKTIMDYLIDDAQSNRNLMQLITDDNLTFKDDIVKAQYVDNSDDLHQVVQSLAGSPAIKKGILQSLKIVDELVKVMGKEPEQIVVEMARENQTTAKGRRNSQQRYKRLKEAIKSLDRDLNHKILKEHPTDNQALQNNRLFLYYLQNGRDMYTGESLDINRLSDYDIDHVIPQAFIKDNSIDNRVLTSSKANRGKSDDVPSEDVVNRMRPFWNKLLSSGLISQRKYNNLTKKELTPDDKAGFIKRQLVETRQITKHVARMLDERFNKEFDDNNKRIRRVKIVTLKSNLVSSFRKEFELYKVREINDYHHAHDAYLNAVVVKALLVKYPKLEPEFVYGEYPKYNSYRERKTATQKMFFYSNIMNMFKSKVKLADDQIVERPMIEVNDETGEIAWDKTKHITTVKKVLSYPQVNIVKKVEEQTIGQNGGLFDDNPKSPLEVIPSKLVPLKKALNPEKYGGYQKPTTAYPILLIVDTKQLIPISVMDKKRFEQNPVKFLKDKGYQQIEKNNFVKLPKYTLVDIGNGIKRLWASSKEVHKGNQLVVSKKSQDLLYHAHHLDNDYSNEYVKNHYQQFDILFNEITSFSKKCKLGKEHIQKIEEAYSKERDSASIEELADGFIKLLGFTQLGATSPFSFLGIKLNQKQYTGKKDYLLPCMEATLIHQSITGLYETRIDLNKLGGD

SEQ ID NO: 740 - protein, 1355 aa, Streptococcus mutans; identical to SEQ ID NO: 739

SEQ ID NO: 741 - protein, 1125 aa, Streptococcus mutans
MTNGKILGLDIGIASVGVGIINAKTGNVEHASSRIFPAANADNNVERRSARGGRRLIRRKKHRLKRVEDLFEKYNIDTDFSNLNLNPYQLRVKGLNEQLSNEELFAILKNIAKRRGISYLDDAEDDSVGSSDYAKAIDENRKLLKKQTPGEIQLKRLEKYGQLRGNFTIQDENGEYHRLINVFSTSDYVKEARRILETQSYYNKFITESFVEDYIKILQGKRKYYVGPGNEKSRTDYGIYRTDGETLDNLFGILIGKCGFYPEEYRAAKASYTAQEYNFLNDLNNLTVPTETKKLSTEQKYQLVDFAKTASTLEAAKLLKEIAKLVGCQVEEIKGYRLDNKDKPDLHTFEPFRKLKSNLTTIAVENLSITTLDTLAHILTLNTEREGIEEAIQKELPNIFSDEQITGIIAVRKKNSQIFGKGWHSFSIKLMKELIPELYETSEEQMTILIRLKKVKTNSKITNRTKYINEQEVTDEIYNPVVSKSIRQTVKIINAAIKKYGAFDQIVIEMPRESNEEDERKFIADLQKSNAKEKDDAMKQAALLYNGKAELPHGVFHGHKELATKIRLWYQQGERCLYSGKHIDIHDLIHNQHMFEIDHVLPLSLSFDDSLANKVLVYSWANQEKGQRTPFQALPQMASAWSFRELRDYISKQKGISKKKRDYLLTEQDINKVEVKQKFIERNLVDTRYVSRVVLNTLQDALKVMNKETKISVIRGQFTSQLRRQWRIDKSRETYHHHAVDALIIAASSQLRLWKKQNNPMFAEDKHGQKINLDTGEVLSDDAYKELVYQAPYQGFVNTISSKSFEDEILFSYQVDSKVNRKISDATIYATRQAQLGKDKKEETYVLGKIKDIYSQAGYDAFRKKYDKDKAVFLMYQKDPETWEKVIEVILRDYKELDDKGKEIGNPFERYKVKHGFVRKYSRKNKGTEIKSLKYYDNKLGNHIDITPNNSKHSVVLQSINPWRADLYFNPETTKYELMGLKYADLSFEKGTGKYSISREKYDEIKEREGISSKSEFKFTLYKNDLILVKDIGNHKELIARFNSKNDTSKHYVELKPWNKAKFDSEEELIPAFGKVAKSGQFIKGLNKPDLSIYKVKTDILGHKYYIKKEGDKPKLNFENKIKNK

SEQ ID NO: 742 - protein, 1125 aa, Streptococcus mutans
MTNGKILGLDIGIASVGVGIINAKTGNVEHASSRIFPAANADNNVERRSARGGRRLIRRKKHRLKRVEDLFEKYNIDTDFSNLNLNPYQLRVKGLNEQLSNEELFAILKNIAKRRGISYLDDAEDDSVGSSDYAKAIDENRKLLKKQTPGEIQLKRLEKYGQLRGNFTIQDENGEYHRLINVFSTSDYVKEARRILETQSYYNKFITESFVEDYIKILQGKRKYYVGPGNEKSRTDYGIYRTDGETLDNLFGILIGKCGFYPEEYRAAKASYTAQEYNFLNDLNNLTVPTETKKLSTEQKYQLVDFAKTASTLGAAKLLKEIAKLVGCQVEEIKGYRLDNKDKPDLHTFEPFRKLKSNLTTIAVENLSITTLDTLAHILTLNTEREGIEEAIQKELPNIFSDEQITEIIAVRKKNSQIFGKGWHSFSIKLMKELIPELYETSEEQMTILTRLKKVKTNSKITNRTKYINEEEITDEIYNPVVSKSIRQTVKIINATIKKYGAFDQIIIEMPRESNEEDERKFIADLQKSNAKEKDDAMKQAALLYNGKDELPHDVFHGHKELATKIRLWYQQGERCLYSGKHIDIHDLIHNQHMFEIDHVLPLSLSFDDSLANKVLVYSWANQEKGQRTPFQALPQMASAWSFRELRDYISKQKGISKKKRDYLLTEQDINKVEVKQKFIERNLVDTRYVSRVVLNTLQDALKVMNKETKISVIRGQFTSQLRRQWRIDKSRETYHHHAVDALIIAASSQLRLWKKQNNPMFAEDKHGQKINLDTGEVLSDDAYKELVYQAPYQGFVNTISSKSFEDEILFSYQVDSKVNRKISDATIYATRQAQLGKDKKEETYVLGKIKDIYSQAGYDAFRKKYDKDKAVFLMYQKDPETWEKVIEVILRDYKELDDKGKEIGNPFERYKVKHGFVRKYSRKNKGTEIKSLKYYDNKLGNHIDITPNNSKHSVVLQSINPWRADLYFNPETTKYELMGLKYADLSFEKGTGKYSISREKYDEIKEREGISSKSEFKFTLYKNDLILVKDIGNHKELIARFNSKNDTSKHYVELKPWNKAKFDSEEELIPAFGKVAKSGQFIKGLNKPDLSIYKVKTDILGHKYYIKKEGDKPKLNFENKIKNK

SEQ ID NO: 743 - protein, 1125 aa, Streptococcus mutans; identical to SEQ ID NO: 742

SEQ ID NO: 744 - protein, 1125 aa, Streptococcus mutans; identical to SEQ ID NO: 741

SEQ ID NO: 745 - protein, 670 aa, Streptococcus oralis
MAKFNKNYSIGLDIGVSSVGYAVVTEDYRVPAFKFKVLGNTEKEKIKKNLIGSTTFVPAQSAQGTRVFRVNRRRIDRRNHRIAYLRDIFQKEIGKIDKNFYRRLDESFRVLGDKSEDIQIKQPFFGNKELETAYHKKYPTIYHLRKHLADADKNSPVADIREVYMALSHIFKYRGHFLTLGKIDPNNINMQNSWIDFIESCQDAFDLEISDESKTIAAIFKSSDNRQEKVKGILSYFQPELAKKDKSIFKQLLQLLFGLKTKFKECFELEEEPDLNFSKENYDENLENLLGTLEEDFPDVFAKLKILRDTILLSDMLTYTGATHARFSATMVERYEEHRKDLQRFKSFVKQNLSEQDYLDIFGRKTPNGFDVDKETKGYVGYISNKMVLTNKQKTIQQNFYDYISGKITGIEGAEYFLNKISDGTFLRKLRTTDNGTIPNQIHAYELEKIIERQGRDYPFLLENKDKLLSILTFKIPYYVGPLAKGNNSRFAWIKRTTSQDVLDNNDEDTKNGKIRPWNYHKLINMDETRDAFITNLIGNDIILLNEKVLPKRSLIYEEVMLQNELTRIKYKDKYGKIHFFDSELRQEIINNLFKTNSKRVSSAMLLAYLENFTNLQAVEIVSGIEKGKSLNSTLKTYNDLKTIFSEDLLDSEIYQKELEEIIKVITVFV

SEQ ID NO: 746 - protein, 1373 aa, Streptococcus oralis
MENKNYSIGLDIGTNSVGWAVITDDYKVPSKKMKVLGNTDKRFIKKNLIGALLFDEGTTAEARRLKRTARRRYTRRKNRLRYLQEIFAEEMSKVDSSFFHRLDDSFLIPEDKKGSKYPIFATLIEEKEYHKQFPTIYHLRKQLADSKEKTDLRLIYLALAHMIKYRGHFLYEDTFDIKNNDIQKIFNEFISIYNNTFEGNSLSGQNVQVEAIFTDKISKSAKRERVLKLFPDEKSTGLFSEFLKLIVGNQADFKKHFDLEEKAPLQFSRDTYDEDLENLLGQIGDDFADLFVAAKKLYDAILLSGILTVTDPSTKAPLSASMIERYENHQKDLATLKQFIKTNLPEKYDEVFSDQSKDGYAGYIDGKTTQESFYKYIKNLLSKFEGADYFLEKIEREDFLRKQRTFDNGSIPHQIHLQEMNAILRRQGEHYPFLKENKEKIEKILTFRIPYYVGPLARGNRDFAWLTRNSDQAIRPWNFEEIVDKASSAESFINKMTNYDLYLPEEKVLPKHSLLYETFAVYNELTKVKFIAEGLRDYQFLDSRQKKDIFYTLFKAEDKRKVTEKDIIQYLHTVDGYDGIELKGIEKQFNASLSTYHDLLKIIKDKEFMDDPNNEEILENIVHTLTIFEDREMIKQRLAQYDSLFDEKVIKALTRRHYTGWGKLSSKLINGIRDKQTGKTILDYLMDDGYNNRNFMQLINDDELSFKEIIKKAQVVGKTDDVKQVVQELPGSPAIKKGILQSIKLVDELVKVMGHEPESIVIEMARENQTTARGKKNSQQRYKRIEDSLKILASGLNAKILKEHPTDNIQLQNDRLFLYYLQNGRDMYTGKPLDINQLSSYDIDHIVPQAFIKDDSLDNRVLTSLKDNRGKSDNVPSLEVVEKMKTFWQQLLDSKLISYRKFNNLTKAERGGLDERDKVGFIKRQLVETRQITKHVAQILDARYNTEVNEKDKKNRTVKIITLKSNLVSNFRKEFRLYKIREINDYHHAHDAYLNAVVAKAILKKYPKLEPEFVYGDYQKYDLKRYISRSKDPKEIEKATEKYFFYSNLLNFFKEEVHYADGTIVKRENIEYSKDTGEIAWNKEKDFATIKKVLSLPQVNIVKKREVQTGGFSKESILPKGNSDKLIPRKTKDILWDTTKYGGFDSPVIAYSILLIADIEKGKAKRLKTVKTLVGITIMEKATFEKSPIAFLENKGYHNVRKENILCLPKYSLFELKNGRRRMLASAKELQKGNEIVLPVHLTTLLYHAKNIHRLDEPEHLEYIQKHRNEFKGLLNLVSEFSQKYVLADANLEKIKNLYADNEQADIEILANSFINLLTFTALGAPAAFKFFGKDVDRKRYTTVSEILNATLIHQSITGLYETRIDLSKLGED

SEQ ID NO: 747 - protein, 1371 aa, Streptococcus oralis
MENKNYSIGLDIGTNSVGWSVITDDYKVPSKKMKVLGNTDKRFIKKNLIGALLFDEGTTAEARRLKRTARRRYTRRKNRLRYLQEIFAEEMSKVDSSFFHRLDDSFLIPEDKRGSKYPIFATLAEEKEYHKQFPTIYHLRKQLADSKEKTDLRLIYLALAHMIKYRGHFLYEDTFDIKNNDIQKIFSEFISIYDNTFEGSSLSGQNAQVEAIFTDKISKSAKRERVLKLFPDEKSTGLFSEFLKLIVGNQADFKKHFDLGEKAPLQFSKDTYDEDLENLLGQIGDDFADLFLVAKKLYDAILLSGILTVTDPSTKAPLSASMIERYENHQKDLAVLKQFIKNNLPEKYDEVFSDQSKDGYAGYIDGKTTQEAFYKYIKNLLSKFEGTDYFLEKIEREDFLRKQRTFDNGSIPHQIHLQEMNAILRRQGEHYPFLKDNKEKIEKILTFRIPYYVGPLARGNRDFAWLTRNSDEAIRPWNFEEIVDKASSAEDFINKMTNYDLYLPEEKVLPKHSLLYETFAVYNELTKVKFIAEGLRDYQFLDSGQKKQIVTQLFKEKRKVTEKDIIQFLHNVDGYDGIELKGIEKQFNASLSTYHDLLKIIKDKEFMDDSKNEEILENIVHTLTIFEDREMIKQRLAQYDSLFDEKVIKALIRRHYTGWGKLSAKLIDGICDKQTGNTILDYLIDDGKNNRNFMQLINDDGLSFKEITQKAQVVGKTDDVKQVVQELPGSPAIKKGILQSIKIVDELVKVMGHTPESIVIEMARENQTTARGKKNSQQRYKRIEDALKNLASGLDSNILKEHPTNNIQLQNDRLFLYYLQNGRDMYTGKPLDINQLSSYDIDHIVPQAFIKDDSLDNRVLTSLKDNRGKSDNVPSIEVVQKRKAFWQQLLDSKLISERKFNNLTKAERGGLDERDKVGFIKRQLVETRQITKHVAQILDARFNKEVNEKDKKNRTVKIITLKSNLVSNFRKEFRLYKVREINDYHHAHDAYLNAVVAKAILKKYPKLEPEFVYGDYQKYDLKRYISRSRNPKEVEKATEKYFFYSNLLNFFKEEVHYADGTIVKRENIEYSKDTGEIAWNKEKDFATIKKVLSYPQVNIVKKREVQTGGFSKESILPKGNSDKLIPRKTKDILWETTKYGGFDSPVIAYSILLIADIEKGKAKKLKTVKTLVGITIMEKAAFEENPITFLENKGYHNVRKENILCLPKYSLFELENGRRRLLASAKELQKGNEIVLPVYLTTLLYHSKNVHKLDEPEHLEYIQKHRNEFKDLLNLVSEFSQKYVLADANLEKIQNLYADNEQADIEILANSFINLLTFTALGAPAAFKFFGKDIDRKRYTTVSEILNATLIHQSITGLYETRIDLSKLGED

SEQ ID NO: 748 - protein, 1121 aa, Streptococcus oralis
MNGLVLGLDIGIASVGVGILEKNSGKIIHANSRLFPAATADNNVERRKNRQARRLNRRKKHRGVRFQDLFEDYGLLTDFSKVSINLNPYRLRVDGLNQQLTNEELFIALKNIVKRRGISYLDDASEDGGAVSSDYGKAVEENRKLLAEQTPGQIQLERFEKYGQVRGDFTVVENGEKCRLINVFSTSAYRKEAEKILRKQQEFNNQITDEFIEDYLKILTGKRKYYHGPGNEKSRTDYGRFRTDGTTLDNIFGVLIGKCTFYPNEYRASKSSYTAQEFNLLNDLNNLTVPTETKKLSEEQKKVIVEYAKEAKTLGASTLLKYIVKMIDASVDQISGYRVDVNNKPEMHTFEVYRKMQSLETISVGELSRNVLDELAHILTLNTEREGIEEAINSKLMGVFSQDQVLELVQFRKNNSSLFSKGWHNFSLKLMMELIPELYETSEEQMTILTRLGKQKSKETSKRTKYIDEKELTEEIYNPVVAKSVRQAIKIINEATKKHGIFDNIVIEMARENNEEDAKKDYIKRQKANQDEKNAAMEKAAFQYNGKKELPGNIFNGHKELATKIRLWHQQGEKCLYTGKTIPISDLIHNQYKYEIDHILPLSLSFDDSLSNKVLVHATANQEKGQRTPFQALDSMDDAWSYREFKSYVKDLKSLSNKKKDYLLTEEDISKIEVKQKFIERNLVDTRYSSRVVLNALQDFYKSHQFDTTISVVRGQFTSQLRRKWGLEKSRETYHHHAVDALIIAASSQLRLWKKQNNPLITYKEGQFVDSQTGEIISLTDDEYKELVFKAPYDHFVDTLHSKTFEDGILFSYQVDSKYNRKISDATIYATRKAKLDKDKSEETYVLGKIKDIYSQAGYDAFIKIYNKDKRKFLMYHKDPQTFEKVIEEILRTYPSKERNDKNKEVPCNPFEKYRQENGPIRKYSKKGNGPEIKCLKYYDNKLGNYIDISPDGSDNQVVLQSLKPWRTDVYFNHQTKEYELMGLKYSDLSFEKGSGKYSISNEKYNSIKRIEGVNEQSEFKFTLYKNDLILIKDSENNEQKLFRFNSRNDTAKHYVELKPYDKARFDGQQELITILGNVAKGGQCLKGLNKSNISIFKVKTDVLGKKHIIKKEGDEPKLKF

SEQ ID NO: 749 - protein, 1134 aa, Streptococcus oralis
MNGLVLGLDIGIASVGVGILEKNSGKIVHASSRIFPAATADNNVERRKNRQARRLHRRKKHRGARLKDLFEYYGLLTDFSKVSINLNPYRLRVDGLDQQLTNEELFIALKNIVKRRGISYLDDASEDGGTVSSDYGKAVEENRKLLAEQTPGQIQLERFEKYGQLRGDFTVVENSEKCRLINVFSTSAYKKEAERILRKQQEFNNQITDEFIEDYLKILTGKRKYYHGPGNEKSRTDYGRFRTDGATLDNIFGILIGKCTFYPNEYRASKASYTAQEFNLLNDLNNLTVPTETKKLSEEQKKTIIEYAKSAKTLGASTLLKYIAKMIDASVDQIRGYRVDVNNKPEMHTFEVYRKMQSLETISVGELSRNILDELAHILTLNTEREGIEEAINTKLRDSFSQDQVLELVQFRKNNSSLFSKGWHNFSLKLMMELIPELYETSEEQMTILTRLGKQKSKETSKRTKYIDEKEVTEEIYNPVVAKSVRQAIKIINEATKKHGIFDNIVIEMARENNEEDAKKDYIKRQKANQDEKYAAMEKAAFQYNGKKELPDNIFHGHKELATKIRLWHQQGEKCLYTGKSIPISDLIHNQYKYEIDHILPLSLSFDDSLSNKVLVLATANQEKGQRTPFQALDSMDDAWSYREFKSYVKESKLLGNKKKEYLLTEEDISKIEVKQKFIERNLVDTRYSSRVVLNALQDFYKNHNFDTTISVVRGQFTSQLRRKWGLEKSRETYHHHAVDALIIAASSQLRLWKKQNNPLIAYKEGQFVDSQTGEIISLTDDEYKELVFKAPYDHFVDTLSSKTFEDSILFSYQVDSKFNRKISDATIYATRKAKLDKEKKEYTYTLGKIKDIYSLGTKTPSKTGFYKFLDLYNKDKSQFLMFQKDRKTWDEVIEKIMEQYRPFKEYDKAGKLVDFNPFEKYRQENGPIRKYSKKGNGPEIKSLKYYDILLGKHKNITPEGSRNTVALLSLNPWRTDVYYNMETKKYEFLGLKYADLPFEEGGAYGISTETYNELREKEGIGKNSEFKFTLYKNDLILIKDTETNCQQFFRFWSRTGKDNPKSFEKHKIELKPYEKAKFEKGEELEVLGKVPPSSNQFQKNMQIENLSIYKVKTDVLGNKHFIKKEGDKPKLKF

SEQ ID NO: 750 - protein, 550 aa, Streptococcus oralis
MYSLDKNGSPTPLYRDQLNQYEVDHIIPYSFLPIDSIDNKVLTHRENNQRKLDNIPDKETVANMKPFWEKLYNAKLISQTKYQRLTTSERTPDGVLTESMKAGFIERQLVETRQIIKHVARILDNRFSDTKIITLKSQLVTNFRNTFHIAKIRELNDYHHAHDAYLAVVVGQTLLKAYPKLAPELIYGHHAHFNRHEENKATIRKYLYSNIMRFFNNPDSKVSKDIWDCNRDLPIIKDIIYNSQVNFVKRTMIKKGAFYNQNPVGKFNKQIAANNRYPLKTKVSSLDTSIYGGYGPMNSALSIIIIAERFNEKKCKIETVKEFHDIFIIDYKKFNNDPFQFLNDTSENGFLKKNNINRVLAFYRVPKYSLMQKIDGTRMLFESKSNLHKATQFKLTKTQNELFFHMRRLLTKSNLMDLKSESAIKESQNFILKHKEEFDNISNQLSAFSQKMLGDTTSLKNLIKGYNERKIKEINSSEETIKYFYDNFIKMFSFVKSGAPKDINDFFNNKYTVARMRPKPDKKLLNATLIHQSITGLYETRIDLSKLGED

SEQ ID NO: 751 - protein, 1140 aa, Streptococcus parasanguinis
MNGLVLGLDIGIASVGVGILKKDIGEIIHTNSRLFSAATADSNIERRGHRGGKRLTRRKKHRSIRLHDLFEDFGLLTDFSKVSINLNPYQLRVQGLDNQLTNEELFIALKNIVKRRGISYLDDASEDGGTVSSDYGKAVEENRKLLAEQTPGQIQLDRFEKYGQVRGDFNVVENGEKRRLINVFTTSAYSKEAERILRKQQEFNKKITDEFIEDYLTILTGKRKYYHGPGNEKSRTDYGRYTTKKDPEGKYITLDNIFGILIGKCTFYPDEYRASKASYTAQEFNLLNDLNNLTVPTETKKLSEEQKKTIIKYAKTAKTLGASTLLKYIAKLIGASVDQIHGYRIDPNKKPEMHTFETYRKMQSLETISVEELPRKVLDELAHILTLNTEREGIEEAINATLKDTFSQDQVLELVQFRKNNSSLFSKGWHSFSLKLMMELIPELYETSEEQMTILTRLGKQKSKETSKRTKYIDEKELTEEIYNPVVAKSVRQAIKIINEATKKYGIFDNIVIEMARENNEEDAKKEYIKRQKANLDEKNAAMEKAAFQYNGKKELPDNVFHGHKELATKIRLWHQQGEKCLYTGKNIPISDLIQNQYKYEIDHILPLSLSFDDSLSNKVLVLATANQEKGQRTPFQALDSMDDAWSYREFKSYVKDSKLLGNKKKEYLLTEEDISKIEVKQKFIERNLVDTRYSSRVVLNALQDFYKEHQFDTTISVVRGQFTSQLRRKWGLEKSRETYHHHAVDALIIAASSQLRLWKKQNNPLISYTEGQFVDQVTGEIISLSDDEYKELVFKAPYDHFVDTLKSKKFEDSILFSYQVDSKYNRKISDATIYATRKAKLDKENKEYTYTLGKIKDIYALGTKSPSKTGFYKFLDLYNKDKSQFLMFQKDRKTWDEVIEKIIEQYRPFKEYDENGKEVDFNPFEKYRIENGPIRKYSKKGNGPEIKSLKYYDNLLGKFVDITPSESKNPVALLSLNPWRTDVYYNTETSKYEFLGLKYADLCFEKGGAYGISEVKYNKIREKEGIGKESEFKFTLYKNDLILIKDTETNCQQIFRFWSRTGKDNPKSFEKHKIELKPYEKARFEKGEELEVLGKVPPSSNQLQKNMQIENLSIYKVKTDVLGNKHFIKKEGEEPKLKF

SEQ ID NO: 752 - protein, 1374 aa, Streptococcus pseudoporcinus
MKKRYSYSIGLDIGTNSVGWAVINEDYKVPAKKMTVFGNTDRKTIKKNLLGTVLFDSGETAQARRLKRTNRRRYTRRRYRLCQLQNIFATEMVKVDDTFFQRLSESFFYYQDKAFDKHPIFGNSKEERAYHKTYPTIYHLRKDLADRDQKADLRLIYLALSHIIKFRGHFLIEGKLNSENTDVQKLFIALVTVYNLLFEEEPIAGETCDAKALLTAKTSKSKRLESLISEFPGQKKNGLFGNLLALALGLRPNFKSNFGLSEDAKLQITKDTYEEELDNLLAEIGDHYADLFLAAKNLSDAILLSDILTLSDENTRAPLSASMIKRYEEHQEDLALLKKLVKEQMPEKYWEIFSNAKKNGYAGYIEGKVSQEDFYRYIKPILSRLKGGDEFLAKIDRDDFLRKQRTFDNGSIPHQIHLKELHAILRRQEKYYPFLAEQKEKIEQLLCFRIPYYVGPLAKGGNSSFAWLKRRSDEPITPWNFKDVVDEEASAQAFIEGMTNYDTYLPEEKVLPKHSPLYEMFTVYNELTKVKYIAENMTKPLYLSAEQKEAIIDHLFKQTRKVTVKDLKEKYFSQIEGLENVDVTGVEGAFNASLGTYNDLLKIIKDKAFLDDEANAEILEEIVLILTLFQDEKLIEKRLAKYANLFEKSVLKKLRKRHYRGWGRLSRQLIDGMKDKASGKTILDFLKADDFANRNFIQLINDSSLDFEKLIDDAQKKAIKRESLTEAVANLAGSPAIKKGILQSLKVVDEIVKVMGHNPDNIVIEMSRENQTTAQGLKNARQRLKKIKEVHKKTGSRILEDNSERITNLTLQDNRLYLYLLQDGKDMYTGQDLDINNLSQYDIDHIIPQSFIKDNSIDNLVLTTQKANRGKSDNVPSIEVVRDMKDRVWRRQLANGAISRQKFDHLTKAERGGLADSDKARFLRRQLVETRQITKHVAQLLDSRFNSKSNQNKKLARNVKIITLKSKIVSDFRKDFGLYKLREVNNYHHAHDAYLNAVVGTALLKKYPKLEAEFVYGDYKHFDLVKLISKSDPSLGKATAKVFFYSNIMNFFKEELSLADGTLMKRPVIETNTETGEVVWDKVKDFKTIRKVLSYPQVNIVKKTEIQSGAFSKESVLSKGNSDKLIERKKGWDPKKYGGFDSPNTAYSIFVVAKVAKRKAQKLKTVKEIVGITIMEQAEYEKDNIAFLEKKGYQDIQEKLLIKLPKYSLFELENGRRRLLASANEFQKGNELALSGKYMKFLYLASRYDKLSSKIESEQQKKLFVEQHLHYFDEILDIVVKHATCYIKAENNLKKIISLYKKKEAYSINEQALNMLNLFIFTSLGAPSTFVFFDETIDRKRYTTSSDVLNGILIQQSITGLYETRIDLSRFGGD

SEQ ID NO: 753 - protein, 1052 aa, Streptococcus pyogenes
LSASMIKRYDEHHQDLTLLKALVRQQLPEKYKEIFFDQSKNGYAGYIDGGASQEEFYKFIKPILEKMDGTEELLAKLNREDLLRKQRTFDNGSIPHQIHLGELHAILRRQEDFYPFLKDNREKIEKILTFRIPYYVGPLARGNSRFAWMTRKSEETITPWNFEEVVDKGASAQSFIERMTNFDKNLPNEKVLPKHSLLYEYFTVYNELTKVKYVTEGMRKPAFLSGEQKKAIVDLLFKTNRKVTVKQLKEDYFKKIECFDSVEISGVEDRFNASLGTYHDLLKIIKDKDFLDNEENEDILEDIVLTLTLFEDREMIEERLKTYAHLFDDKVMKQLKRRRYTGWGRLSRKLINGIRDKQSGKTILDFLKSDGFANRNFMQLIHDDSLTFKEDLQKAQVSGQGDSLHEHIANLAGSPAIKKGILQTVKVVDELVKVMGRHKPENIVIEMARENQTTQKGQKNSRERMKRIEEGIKELGSDILKEYPVENTQLQNEKLYLYYLQNGRDMYVDQELDINRLSDYDVDHIVPQSFLKDDSIDNKVLTRSDKNRGKSDNVPSEEVVKKMKNYWKQLLNAKLITQRKFDNLTKAERGGLSELDKAGFIKRQLVETRQITKHVAQILDSRMNTKYDENDKLIREVRVITLKSKLVSDFRKDFQFYKVREINNYHHAHDAYLNAVVGTALIKKYPKLESEFVYGDYKVYDIRKMIAKSEQEIGKATAKYFFYSNIMNFFKTEITLANGEIRKRPLIETNGETGEIVWDKGRDFATVRKVLSMPQVNIVKKTEVQTGGFSKESILPKRNSDKLIARKKDWDPKKYGGFDSPTVAYSVLVVAKVEKGKSKKLKSVKELVGITIMERSSFEKDPVDFLEAKGYKEVRKDLIIKLPKYSLFELENGRKRMLASAGELQKGNELALPSKYVNFLYLASHYEKLKGSPEDNEQKQLFVEQHKHYLDEIIEQISEFSKRVILADANLDKVLSAYNKHRDKPIREQAENIIHLFTLTNLGAPAAFKCFDTTIGRNRYKSIKEVLDATLIHQSITGLYETRIDLSQLGGD

SEQ ID NO: 754 - protein, 1368 aa, Streptococcus pyogenes; identical to SEQ ID NO: 42

SEQ ID NO: 755 - protein, 1367 aa, Streptococcus pyogenes; identical to SEQ ID NO: 246

SEQ ID NO: 756 - protein, 1368 aa, Streptococcus pyogenes [sequence omitted]

SEQ ID NO: 757 - protein, 1370 aa, Streptococcus ratti
MKKPYSIGLDIGTNSVGWAVITDDYKVPAKKMKVLGNTDKNYIKKNLLGALLFDSGNTAEDRRLKRTARRRYTRRRNRLLYLQDIFSDEMNKVDESFFHRLEDSFLVSEDKRGDHHPIFGNVVDEVKYHEQFPTIYHLRKYLADTPEKADLRLVYLALAHMIKFRGHFLIDDPKLDVKNTDSQELFSQFLTAYDVTQEDSHLADVKINISDIITEKMNKSRKVEALLFHFPSQKKNSFFGNLVSLVFGLLPNFKTNFNLAEDAKLQLSKDSYDEDLENLLGQIGDEYTDVFVAARKLYDSILLSGILTVNDLSTKAILSASMVRRYEEHNKDLAKLKAFVKANFTHDVFKEVFSDASKNGYAGYIEGKTSQEDFYKYVKNLIGKVDGSADFIEKIDREDFLRKQRTFDNGSIPHQVHLAEMKAILRRQGEYYPFLKEHAEKIQQILTFRIPYYVGPLDRHGHSDFAWASFNSEEKVTPWNFEEIIDKNKSAQAFIERMTNQDLYLPNEKVLPKHSPLYEKYTVYNELTKIKYVTETGTAKFFDANLKQEIFDGLFKKERKVTKRKLLTFLEKNFDEFRIVDIQGLDKETETFNASYGIYQDLLKIIKDKAFMDDSENADILEDIVLTLTLFEDREMIKQRLAKYADLFDKKVIDNLARRRYTGWGRLSAKLLNGIRDKRSRKTIMDYLVDDGRSNRNLMQLITDDNLTFKDEIAKAQYSDNSDDLHQVVQDLAGSPAIKKGILQSVKIVDELVKVMGYEPEQIVVEMARENQTTAKGRRNSQQRYKRLEEAIKNLDRDLNYKILKEHPTDNQALQNDRLFLYYLQNGRDMYTGESLDINRLSDYDIDHIIPQAFIKDNSIDNRVLVSSAKNRGKSDDVPSEDVVNRMRPFWNKLLNCGLISQRKYSNLTKKELTPNDKAGFIKRQLVETRQITKHVARILDEHFNKEFDEDKKRIRKVKVVTLKSNLVSNFRKEFELYKVREINDYHHAHDAYLNAVVAKALLMKYPKLEPEFVYGEYPKYNSYRERKTATQRMFFYSNIMNMFKSKVKLADERIIERPMIEVNDETGEIAWDKTKHIATVKKVLSYPQINIVKKVEEQTGGLTNETIYPRGSFDKLLNRKNTLEASKYGGFGSPTVAYCVLVVADSKNENGKVKKLKLGSELLGITILEKNDFENNSLDFLSRKGYQGVQEKKIIKLPKYSLFEFQDGSRRMLSSVMANDNKRGDLQKANEMILPAYLVKLLYHAKHINSVGEPAHKNYINEHCSEFQDLLNYIRQFADKFVDVDKNLSKIRSLSKSMAEYSVSEICSSFVNLLTLTALGAPADFKFFGTTIPRKRYGSPQSILSATLIHQSITGLYETRIDLSKLGED

SEQ ID NO: 758 - protein, 1135 aa, Streptococcus salivarius
MSDLVLGLDIGIGSVGVGILNKVTGEIIHKNSRIFPAAQAENNLERRTNRQGRRLTRRKKHRRVRLNHLFEESGLITDFTKVSINLNPYQLRVKGLTAELSNEELFIALKNMVKHRGISYLDDASDDGNSSVGDYAQIVKENSKQLETKTPGQIQLERYQKYGQLRGDFTVEEDGRKHRLINVFPTSAYHAEALRILQTQQEFNPQITDEFINSYLEILTGKRKYYHGPGNEKSRTDYGKYTTKKDAQGQYITLNNIFGILIGKCTFYPEEYRAAKASYTAQEFNLLNDLNNLTVPTETKKLSEEQKYQIITYVKNEKAMGPAKLFKYIAKLLACDIADIKGYRIDKSDKAEIHTFEAYRKMKTLETIDIEQIEREKLDKLAYVLTLNTEREGIQEALDHEFADGTFSQEQVDELVQFRKANSSIFGKGWHSFSVKLMMELIPELYATSEEQMTILTRLGKQKTTSSSNKTKYIDEKQLTEEIYNPVVAKSVRQAIKIVNAAIKKYGDFDNIVIEMARETNEDDEKKAIQKIQKANKAEKDAAMRKAANQYNGKAELPHSVFHGHKQLATKIRLWHQQGERCLYTGKTISIHDLINNPNQFEIDHILPLSITFDDSLANKVLVYATANQEKGQRTPYQALDSMDDAWSFRELKAFVRESKALSNKKKEYLLTEEDISKFDVRKKFIERNLVDTRYASRVVLNALQEHFKAHKIDTKVSVVRGQFTSQLRRHWGIDKTRDTYHHHAVDALIIAASSQLNLWKKQKNTLVSYSEDQLLDIETGELISDDEYKESVFKAPYQHFVDTLKSKEFEDSILFSYQVDSKFNRKISDATIYATRQAKVGKDKKDETYVLGKIKDIYALGTKTPSKTGFYKFLDLYNKDKSQFLVYQKDRKTWDEVIEKIMEQYRPFKESDKNGKEVDFNPFEKYRIENGPIRKYSRKGNGPEIKSLKYYASKLGNHIDITPKDSNNKVVLQSVSPWRADVYFNKTTGSYEILGLKYADLQFEKGTGTYRISEEKYNDIKKKEGVDSDSEFKFTLYKNDLLLIKDTETKEQRLFRFLSRSMPNKKHYVELKPYSKDKFEKNESLIEILGSADKSGRCIKGLAKSNLSIFKVRTDVLGNQHIIKNEGDKPKLDF

SEQ ID NO: 759 - protein, 1127 aa, Streptococcus salivarius
MSDLVLGLDIGIGSVGVGILNKVTGEIIHKNSRIFPAAQAENNVERRINRQGRRLTRRKKHRRVRLNHLFEESGLITDFTNVSINLNPYQLRVKGLTDELSNEELFIALKNMVKHRGISYLDDASDDGNSSVGDYAQIVKENSKQLETKTPGQIQLERYQKYGQLRGDFTVEEDGKKHRLINVFPTSAYRAEALRILQTQQEFNPQITDEFINSYLQILTGKRKYYHGPGNEKSRTDYGRYTTKKDSEDEYITLDNIFGILIGKCTFYPEEYRAAKASYTAQEFNLLNDLNNLTVPTETKKLSEEQKNQIITNVKNEKAMGPAKLFKYIAKLLSCDVADIKGYRIDKSDKAEIHTFEAYRKMKTLATIDIEQMERENLDKLAYVLTLNTEKEGIQEALEHEFADGTFSQEQIDELVQFRKANSSIFGKGWHSFSVKLMMELIPELYATSEEQMTILTRLGKQKTTSSSNKTKYIDEKQLTEEIYNPVAAKSVRQAIKIVNAAIKEYGDFDNIVIEMARETNEDDEKKAIQKIQKANKDEKDAAMLKAANQYNGKAELPHSVFHGHKQLATKIRLWHQQGERCLYTGKTISIHDLINNSNQFEIDHILPLSITFDDSLANKVLVYATANQEKGQRTPYQALDSMDDAWSFRELKAFVRDSKALSNKKKEYLLTEEDISKFDVRKKFIERNLVDTRYASRVVLNALQEHFRVHKTDTKVSVVRGQFTSQLRRHWGIEKTRDTYHHHAVDALIIAASSQLNLWKKQKNTLVSYSEDQLLDIETGELISDDEYKESVFKAPYQHFVDTLKSKEFEDSILFSYQVDSKFNRKISDATIYATRQAKVGKDKKDETYVLGKIKDIYSQTGYDAFIKIYKKDKSKFLMYRHDPQTFEKVIEPILENYPNKELNEKGKEVPCNPFLKYKEDHGYIRKYSKKGNGPEIKSLKYYDSKLGNHIDITPKNSNNKVVLQSVSPWRADVYFNKTTGKYEILGLKYADLKFEKGTGTYKISEEKYNDIKIKEGVDSDSEFKFTLYKNDLLLIKDTETKEQQLFRFLSRTMPNVKHYVELKPYDKQKFDDNEELIKILGIVAKGGQCKKGVSKPNISIYKIRTDVLGNQHIIKNEGDKPKLDF

SEQ ID NO: 760 - protein, 1385 aa, Streptococcus salivarius
MTKPYSIGLDIGTNSVGWAVITDDYKVPSKKMKVLGNTSKKYIKKNLLGALLFDSGITAEGRRLKRTARRRYTRRRNRILYLQEIFSTEMATLDDAFFQRLDDSFLVPDDKRDSKYPIFGNLVEEKVYHDEFPTIYHLRKHLADSSKKADLRLVYLALAHMIKYRGHFLIEGDFNSKNNDLQKNFQDFLDTYNAIFESDLSLENSKQLEEIVKDKISKSAKKDRILKLFPGEKNSGIFSEFLKLIVGNQADFRKYFNLDEKTSLQFSKESYDEDLETLLGHIGDDYSDVFLKAKKLYDAILLSGILTVTDNGTEAPLSSAMIMRYKEHEEDLALLKAYIRNISLETYNEVFKDNTKNGYAGYIDGKTSQEDFYVYLKRLLAGLEGADYFLEKIDREDFLRKQRTFDNGSIPYQIYLQEMRAILDKQAKFYPFLAKNKERIEKILTFRIPYYVGPLARGNSDFAWSIRKRNEKITPWNFEDVIDKESSAEAFINRMTSFDLYLPEEKVLPKHSLLYENFTVYNELTKVRFIAEGMRDYQFLDSKQKKDIVRLYFKGKRKVTDKDIIEYLHAIDGYDGIELKGIEKQFNSSLSTYHDLLNIINDKEFLDDSSNETIIEEIIHTLTMFEDREMIKQRLSKFDNIFDKSVLKKLSRRHYTGWGKLSAKLINGIRDEKSGNTILDYLIDDGVSNRNFMQLIHDDALSFKKKIKKAQIIGDKDNIKQVVKSLPGSPAIKKGILQSIKIVDELVKVMGREPESIVVEMARENQYTNQGKSNSQQRLKRLEESLKGLGSKILKENVPTRLSKIDNNALQNDRLYLYYLQNGKDMYTGEELDIDRLSNYDIDHIIPQAFLKDDSIDNKVLVSSASNRGKSDDVPSLEVVKKRKTLWYQLLKSKLISQRKFDNLTKAERGGLSQEEKAGFIQRQLVETRQITKHVARLLDERFNNKKDENNRTLRTVKIITLKSSLVSQFRKDFELYKVREINDFHHAHDAYLNAVVASALLKKYPKLEPEFVYGDYPKYNSFRERKSATEKVYFYSNIMNIFKKSIPLADGTVIDRPLIEVNEETGESVWNKVADLNTVRKVLSYSQVNIVKKVEEQNHGLDRGKPKGLFNANLSSKPKPNSKENLVGAKEYLDPKKYGGYAGISNSFAILVKGTIEKGAKKKITNVLEFQGISILDRIYYRKDKLNFLLEKGYKDIELIIELPKYSLFELSDGSRRMLASILSTNNKRGEIHKGNQIFISQKFVKLLYHAKRISSTFNENHRKYVENHKKEFEELFYYILEFNENYVGAKKNGELLKSAFQSWQNHSIDELCSSFIGPTGSERKGLFELTSRGGAADFEFLGVKIPRYRDYTPSSLLKDATLIHQSVTGLYETRIDLGKLGED

SEQ ID NO: 761 - protein, 1392 aa, Streptococcus sanguinis
MENKNYSIGLDIGTNSVGWAVITDDYKVPSKKMKVFGNTDKHFIKKNLIGALLFDEGATAEDRRLKRTARRRYTRRKNRLRYLQEIFSEEISKLDSSFFHRLDDSFLVPKDKRGSKYPIFATLEEEKEYHKKFPTIYHLRKHLADSKEKTDLRLIYLALAHMIKYRGHFLYEESFDIKNNDIQKIFNEFISIYDNTFEGSSLSGQNAQVEAIFTDKISKSAKRERVLKLFSDEKSTSLFSEFLKLIVGNQADFKKHFDLEEKAPLQFSKDTYDEDLENLLGQIGDGFTDLFLVAKKLYDAILLSGILTVTDPSTKAPLSASMIERYESHQKDLAALKQFIKNNLPKRYNEVFSDQSKDGYAGYIDGKTTQEAFYKYIKNLLSKFEGADYFLDKIEREDFLRKQRTFDNGSIPHQIHLQEMNAILRRQGEHYPFLKENREKIEKILTFRIPYYVGPLARGNRDFAWLTRNSDQAIRPWNFEEIVDKASSAEEFINKMTNYDLYLPEEKVLPKHSLLYETFAVYNELTKVKFIAEGLRDYQFLDSGQKKQIVNQLFKEKRKVTEKDIIHYLHNVDGYDGIELKGIEKQFNASLSTYHDLLKIIKDKEFMDDPKNEEILENIVHTLTIFEDREMIKQRLAQYDSIFDEKVIKALTRRHYTGWGKLSAKLINGICDKQTGDTILDYLIDDGKINRNFMQLINDDGLSFKEIIQKAQVVGKTDDVKQVVQELPGSPAIKKGILQSIKIVDELVKVMGYAPESIVIEMARENQTTARGKKNSQQRYKRIEDSLKNLAPGLDSNILKENPTDNIQLQNDRLFLYYLQNGKDMYTGKPLDIDQLSSYDIDHIIPQAFIKDDSIDNRVLTSSKDNRGKSDNVPSLEVVQKRKAFWQQLLDSKLISERKFNNLTKAERGGLDERDKVGFIRRQLVETRQITKHVAQILDASFNTEVNEKNQKIRTVKIITLKSNLVSNFRKEFELYKVREINDYHHAHDAYLNAVVAKAILKKYPKLEPEFVYGDYQKYDLKRYISRFKPSKEIEKATEKYFFYSNLLNFFKEEVHYADGIIVKRENIEYSKDTGEIAWNKEKDFATIKKVLSYPQVNIVKKTEIQTHGLDRGKPKGLFNSNPSPKPSEDSKENLVPIKQGLDPRKYGGYAGISNSYAVLVKAIVEKGAKKQQKTILEFQGISILDKINFENNKENYLLKKRYIEILSTITLPKYSLFEFPDGTRRRLASILSTNNKRGEIHKGNELVLPGKYTTLLYHAKNINKKLEPEHLEYVEKHRNDFAKLLECVLNFNDKYVGALKNGERIRQAFTDWETVDIEKLCFSFIGPENSKNAGLFELTSQGSASDFEFLGVKIPRYRDYAPSSLLKATLIHQSITGLYETRIDLSKLGED

SEQ ID NO: 762 - protein, 1377 aa, Streptococcus sanguinis
MKKPYSIGLDIGTNSVGWAVITDDYKVPSKKMKVLGNTDKHFIKKNLIGALLFDEGTTAEDRRLKRTSRRRYTRRKNRLRYLQEIFSEEISKLDSSFFHRLDDSFLVPEDKRGSKYPIFATLEEEKEYHKKFPTIYHLRKHLADSKEKTDLRLIYLALAHMIKYRGHFLYEESFDIKNNDIQKIFNEFISIYDNTFEGSSLSGQNAQVEAIFTDKISKSTKRERVLKLFSDEKSTGLFSEFLKLIVGNQADFKKHFDLEEKAPLQFSKDTYDEDLENLLGQIGDGFADLFLVAKKLYDAILLSGILTVTDPSTKAPLSASMIERYENHQEDLAALKQFIKNNLSEKYAEVFSDQSKDGYAGFIDGKTTQEAFYKYIKNLLSKLEGADYFLNKIEREDFLRKQRTFDNGSIPHQIHLQEMNAILRRQGEHYLFLKENREKIEKILAFRIPYYVGPLARGNRDFAWLTRNSDQAIRPWNFEEVVDKASSAEDFINKMTNYDLYLPEEKVLPKHSLLYETFAVYNELTKVKFIAEGLRDYQFLDSGQKKQIVNQLFKDKRKVTEKDIIHYLHNVDGYDGIELKGIEKQFNASLSTYHDLLKIIKDKEFMDNPKNGEILENIIHTLTIFEDREMIKQRLAQYDTLFDEKVIKALTRRHYTGWGKLSAKLINGIRDKQTGKTILEYLIDDGDCNRNFMQLINDDGLSFKEIIQKAQVVGKTDDVKQVVQEIPGSPAIKKGILQSIKIVDELVKVMGHNPESIVIEMARENQTTAKGKKNSQQRYKRIEDALKNLAPGLDSNILKENPTDNIQLQNDRLFLYYLQNGKDMYTGKAIDINQLSNYDIDHIIPQAFIKDDSLDNRVLTSSKDNRGKSDNVPSIEVVQKRKAFWQQLLDSKLISERKFNNLTKAKRGGLDERDKVGFIKRQLVETRQITKHVAQLLDTRFNTEVNEENQKIRTVKIITLKSNLVSNFRKEFGLYKVREINDYHHAHDAYLNAVVAKAILKKYPKLEPEFVYGDYQKYDLKRYILKSKASNTIDKATEKYFFYSNLLNFFKEKVRYADGTIKKRENIEYSNDTGEIAWNKEKDFATIKKVLSLPQVNIVKKTEEQTVGQNGGLFDNNIVSKKKVVDASKLIPIKSSLSPEKYGGYARPTIAYSVLVIADIEKGKGKAKKLKRIKEIVGITIQDKKKFESNPVTYLEECGYKNINSNLIIKLPKYSLFEFNDGQRRLLASSIELQKGNELILPYHLTALLYHAQRINKISEPIHKQYVEAHQNEFKELLTTIISLSKKYIQKPNVELLLQQAFDQADKDIYQLSESFISLLKLTSFGAPGAFKFLGVEISQSSVRYKPNSQFLDTTLIHQSITGLYETRIDLSKLGED

SEQ ID NO: 763 - protein, 1370 aa, Streptococcus sanguinis
MKKPYSIGLDIGTNSVGWAVVTDDYKVPAKKMRVFGDTDRSHIKKNLLGTLLFDDGNTAESRRLKRTARRRYTRRRNRILYLQEIFTESMNEIDESFFHRLDDSFLVPEDKRGSKYPIFATLQEEKEYHKQFPTIYHLRKQLADSKEKSDVRLIYLALAHMIKYRGHFLYEETFDIKNNDIQKIFNEFINIYDNTFEGSSLSGQNAQVEAIFTDKISKSAKRERVLKLFPDEKSTGLFSEFLKLIVGNQADFKKHFDLEEKAPLQFSKDTYDEELENLLGQIGDDFADLFLIAKKLYDAILLSGILTVTDPSTKAPLSASMIERYENHQKDLAALKQFIKNNLPEKYVEVFSDQSKDGYAGYIDGKTTQEAFYKYIKNLLSKFEGADYFLDKIEREDFLRKQRTFDNGSIPHQIHLQEMNAILRRQGEHYPFLKENREKIEKILTFRIPYYVGPLARDNRDFSWLTRNSDEPIRPWNFEEVVDKARSAEDFIHRMTNYDLYLPEEKVLPKHSLLYETFAVYNELTKVKFIAEGLRDYQFLDSGQKKQIVNQLFKEKRKVTEKDIIHYLHNVDGYDGIELKGIEKQFNANLSTYHDLLKITKDKEFMDDPKNEEILENIVHTLTIFEDREMIKQRLAQYDTLFDEKVIKALTRRHYTGWGKLSAKLINGIRDKQSGKTILDYLIDDDKINRNFMQLINDDGLSFKEIIQKAQVVGKTDDVKQVVQELPGSPAIKKGILQSIKIVDELVKVMGYALESIVIEMARENQTTARGKKNSQQRYKRIEDALKNLAPGLDSNILKENPTDNIQLKNDRLFLYYLQNGKDMYTGKPLDINQLSSYDIDHIIPQAFIKDDSIDNRVLTSSKDNRGKSDNVPSLEVVQKRKAFWQQLLDSKLISERKFNNLTKAERGGLDERDKVGFIRRQLVETQQITKNVAQILDARFNTEVKEKNQKIRTVKIITLKSNLVSNFRKEFGLYKVREINNYHHAHDAYLNAVVAKAILKKYPKLEPEFVYGDYQKYDLKKYISRFKPSKEIEKATEKYFFYSNLLNFFKEEVLYADGTIRKRENIEYSKDTGEIAWDKEKDFATIKKVLSYPQVNIVKKREVQTGGFSKESILPKGNSDKLIPRKTKDILWDTTKYGGFDSPVIAYSILLIADIEKGKAKKLKTVKTLVGITIMEKAAFEENPITFLENKGYHNVRKENILCLPKYSLFELENGRRRLLASAKELQKGNEIVLPVCLTTLLYHSKNLHKLDEPEHLEYIQKHRNEFKDLLNLVSEFSQKYILAEANLEKIKDLYADNEQADIEILANSFINLLTFTALGAPAAFKFFGKDVDRKRYTTVSEILNATLIHQSITGLYETRIDLSKLGEE

SEQ ID NO: 764 - protein, 1421 aa, Streptococcus sanguinis
MTKFNKNYSIGLDIGVSSVGYAVVTEDYRVPAFKFKVLGNTEKEKIKKNLIGSTTFVSAQPAKGTRVFRVNRRRIDRRNHRITYLRDIFQKEIEKVDKNFYRRLDESFRVLGDKSEDLQIKQPFFGDKELETAYHKKYPTIYHLRKHLADADKNSPVADIREVYMAISHILKYRGHFLTLDKINPNNINMQNSWIDFIESCQEVFDLEISDESKNIADIFKSSENRQEKVKKILPYFQQELLKKDKSIFKQLLQLLFGLKTKFKDCFELEEEPDLNFSKENYDENLENFLGSLEEDFSDVFAKLKVLRDTILLSGMLTYTGATHARFSATMVERYEEHRKDLQRFKFFIKQNLSEQDYLDIFGRKTQNGFDVDKETKGYVGYITNKMVLTNPQKQKTIQQNFYDYISGKITGIEGAEYFLNKISDGTFLRKLRTSDNGAIPNQIHAYELEKIIERQGKDYPFLLENKDKLLSILTFKIPYYVGPLAKGSNSRFAWIKRATSSDILDDNDEDTRNGKIRPWNYQKLINMDETRDAFITNLIGNDIILLNEKVLPKRSLIYEEVMLQNELTRVKYKDKYGKAHFFDSELRQNIINGLFKNNSKRVNAKSLIKYLSDNHKDLNAIEIVSGVEKGKSFNSTLKTYNDLKTIFSEELLDSEIYQKELEEIIKVITVFDDKKSIKNYLTKFFGHLEILDEEKINQLSKLRYSGWGRYSAKLLLDIRDEDTGFNLLQFLRNDEENRNLTKLISDNTLSFEPKIKDIQSKSTIEDDIFDEIKKLAGSPAIKRGILNSIKIVDELVQIIGYPPHNIVIEMARENMTTEEGQKKAKTRKTKLESALKNIENSLLENGKVPHSDEQLQSEKLYLYYLQNGKDMYTLDKTGSPAPLYLDQLDQYEVDHIIPYSFLPIDSIDNKVLTHRENNQQKLNNIPDKETVANMKPFWEKLYNAKLISQTKYQRLTTSERTPDGVLTESMKAGFIERQLVETRQIIKHVARILDNRFSDTKIITLKSQLITNFRNTFHIAKIRELNDYHHAHDAYLAVVVGQTLLKVYPKLAPELIYGHHAHFNRHEENKATLRKHLYSNIMRFFNNPDSKVSKDIWDCNRDLPIIKDVIYNSQINFVKRTMIKKGAFYNQNPVGKFNKQLAANNRYPLKTKALCLDTSIYGGYGPMNSALSIIIIAERFNEKKGKIETVKEFHDIFIIDYEKFNNNPFQFLNDTSENGFLKKNNINRVLGFYRIPKYSLMQKIDGTRMLFESKSNLHKATQFKLTKTQNELFFHMKRLLTKSNLMDLKSKSAIKESQNFILKHKEEFDNISNQLSAFSQKMLGNTTSLKNLIKGYNERKIKEIDIRDETIKYFYDNFIKMFSFVKSGAPKDINDFFDNKCTVARMRPKPDKKLLNATLIHQSITGLYETRIDLSKLGED

SEQ ID NO: 765 - protein, 317 aa, Streptococcus sp.
FEDSILFSYQVDSKFNRKISDATIYATRKAKLDKEKSEETYVLGKIKDIYSQAGYDAFIKIYNKDKSKFLMYHKDPQTFEKVIEEILRTYPSKELNDKNKEIPCNPFEKYRQENGPIRKYSKKSNGPEIKSLKYYDNKLGNHIDITPESSDNQVVLQSLKPWRTDVYFNHQTKKYELMGLKYSDLSFEKGSGKYSISNQKYNSIKRIEGIDEQSEFKFTLYKNDLILIKDSENNEQKLFRFNSRNDTAKHYIELKPYDKAKFDGEQELITILGNVAKGGRCLKGLNKSNISIFKVKTDVLGKKHIIKKEGDEPKLKF

SEQ ID NO: 766 - protein, 1420 aa, Streptococcus sp.
MAKFNKNYSIGLDIGVSSVGYAVVTEDYRVPAFKFKVLGNTEKEKIKKNLIGSTTFVPAQSAQGTRVFRVNRRRIDRRNHRIAYLRDIFQKEIEKIDKNFYRRLDESFRVLGDKSEDIQIKQPFFGNKELETAYHKKYPTIYHLRKHLADADKNSPVADIREVYMVLSHILKYRGHFLTLGKIDPNNINMQNSWIDFIESCQDAFDLEISDESKTIAAIFKSSENRQEKVKQILSYFQQELLKKDKSIFKQLLQLLFGLKTKFKDCFELEEEPDLNFSKENYDENLENLLGALEEDFSDVFAKLKILRDTILLSSMLTYTGATHARFSATMVERYEEHRKDLQRFKSFVKQNLSEQDYLDIFGRKTPTGFDVDKETKGYVGYISNKMVLTNPQKQKTIQQNFYDYISGKITGIEGAECFLNKISDGTFLRKLRTTDNGAIPNQIHAYELEKIIERQGRDYPFLLENKDKLLSILTFKIPYYVGPLAKGNNSRFAWIKRTTSQDVLDDNDEDTRNGKIRPWNYHKLINMDETRDAFIINLIGNDIILLNEKVLPKRSLIYEEVMLQNELTRVKYKDKYGKIHFFNSELRQEIINNLFKTNSKRVSSAMLLSYLENFTNLQAVEIVSGIEKGKSLNSTLKTYNDLKTIFSEELLDSEIYQKELEEIIKVITVFDDKKSIKNYLTKYFGHLEFLNEEKINQLSKLRYTGWGRYSGKLLLGIRDEDTGFNLMQFLRNDDENRNLTQLISDTTLSFDSAIKAIQSKSTVEDDVFEEIKNLAGSPAIKRGILNSIKIVDELVQIIGYPPQNIIIEMARENMTTEEGQKKAKTRKSKLESALKNIEDSVLESGKVPHSDEQLQSEKLYLYYLQNGKDMYSLDKTGSPTPLYRDQLDQYEVDHIIPYSFLPIDSIDNKVLTHRENNQRKLNNIPDKETVANMKPFWEKLYNAKLISQTKYQRLTTSERTPDGVLTESMKAGFIERQLVETRQIIKHVARILDNRFSDTKIITLKSQLVTNFRNTFHIAKIRELNDYHHAHDAYLAVVVGQTLLKAYPKLAPELIYGHHAHFNRHEENKATLRKHLYSNIMRFFNNPDSKVSKDIWDCNRDLPIVKDVIYNSQINFVKRTMIKKGAFYNQNPVGKLNKQIAANNRYPLKTKVSSLDTSIYGGYGPMNSALSIIIIAERFNEKKGKIETVKEFHDIFIIDYEKFNNNPFQFLNNVSEEGFLKKNDLNRVLAFYRISKYSLMQKIDGTRMLFESKSNLHKVTQFKLTKTQNELFFHMKRLLTKSNLMDLKSESAIKESQNFIQTHQNEFDNIADRLSNYSQKMLGETKSLQTLINGYNERPIKQIDNNEETIRYYYDNFIKMFSFVKSGAPKDIINFFNDKYTVPRMRPKPDRKMLDATLIHQSITGLYETRIDLSKLGED

SEQ ID NO: 767 - protein, 1371 aa, Streptococcus sp.
MENKNYSIGLDIGTNSVGWSVITDDYKVPSKKMKVLGNTDKHFIKKNLIGALLFDEGTTAEARRLKRTARRRYTRRKNRLRYLQEIFSEEIGKVDSSFFHRLDDSFLIPEDKRGSKYPIFATLAEEKKYHKQFPTIYHLRKQLADSKEKTDLRLIYLALAHMIKYRGHFLYEEAFDIKNNDIQKIFNEFISIYNNTFEGNSLSGQNVQVEAIFTDKISKSAKRERVLKLFPDEKSTGLFSEFLKLIVGNQADFKKHFDLEEKAPLQFSRDTYDEDLENLLGQIGDDFADLFLVAKKLYDAILLSGILTVTNPSTKAPLSASMIERYENHQKDLASLKQFIKNNLPEKYDEVFSDQSEDGYAGYIDGKTTQETFYKYIKNLLSKFEGADYFLDKIEREDFLRKQRTFDNGSIPHQIHLQEMNAILRRQGEHYPFLKENKEKIEKILTFRIPYYVGPLARGNRDFAWLTRNSDQAIRPWNFEEIVDKASSAEDFINKMTNYDLYLPEEKVLPKHSLLYETFAVYNELTKVKFIAEGLRDYQFLDSGQKKQIVTQLFKEKRKVTEKDIIQFLHNVDGYDGIELKGIEKQFNASLSTYHDLLKIIKDKAFMDDAKNEAILENIVHTLTIFEDREMIKQRLAQYDSLFDEKVIKALTRRHYTGWGKLSAKLINGISDKQTGNTILDYLIDDGEINRNFMQLINDDGLSFKEIIQKAQVVGKTNDVKQVVQELPGSPAIKKGILQSIKIVDELVKVMGHAPESIVIEMARENQTTARGKKNSQQRYKRIEDSLKILASGLNSKILKEHPTDNIQLQNDRLFLYYLQNGKDMYTGEALDINQLSSCDIDHIIPQAFIKDDSLDNRVLTSSKDNRGKSDNVPSLEVVDKMKVFWQQLLDSKLISYRKFNNLTKAERGGLNELDKVGFIKRQLVETRQITKHVAQILDARFNKEVTEKDKKNRTVKIITLKSNLVSNFRKEFELYKVREINDYHHAHDAYLNAVVAKAILKKYPKLEPEFVYGDYQKYDLKRYISRSKDPKEIEKATEKYFFYSNLLNFFKEEVHYADGTIVKRENIEYSKDTGEIAWNKEKDFATIKKVLSLPQVNIVKKREVQTGGFSKESILPKGNSDKLIPRKTKDILWDTTKYGGFDSPVIAYSILLIADIEKGKAKKLKTVKTLVGITIMEKDAFEKNPIAFLENKGYHNVCKENILCLPKYSLFELENGRRRLLASAKELQKCNEIVLPVYLTTLLYHSKNVHKLDEPGHLEYIQKHRNEFKDLLNLVSEFSQKYVLADANLEKIKNLYADNEQADIEILANSFINLLTFTALGAPAAFKFFGKDVDRKRYTTVSEILNATLIHQSITGLYETRIDLSKLGED

SEQ ID NO: 768 - protein, 93 aa, Streptococcus sp.
MILIKDSENNEQKLFRFNSRNDTAKHYVELKPYDKARFDGQQELITILGNVAKGGQCLKGLNKSNISIFKVKTDVLGKKHIIKKEGDEPKLKF

SEQ ID NO: 769 - protein, 1121 aa, Streptococcus sp.
MNGLVLGLDIGIASVGVGILEKNSGKIIHANSRLFPAATADNNVERRKNRQARRLHRRKKHRGVRFQDLFEDYGLLTDFSKVSINLNPYRLRVDGLNQQLTNEELFIALKNIVKRRGISYLDDASEDGGTVSSDYGKAVEENRKLLAEQTPGQIQLERFEKYGQVRGDFTVVENGEKRRLINVFSTSAYRKEAERILRKQQEFNSKITDEFIEDCLKILTGKRKYYHGPGNEKSRTDYGRFRTDGTTLDNIFGILIGKCTFYPDEYRASKASYTAQEFNLLNDLNNLTVPTETKKLSEEQKKVIVEYAKEAKTLGASTLLKYIAKMIDASVDQIRGYRVDVNNKPEIHTFEAYRKMQSLETISVGELSRNVLDELAHILTLNTEREGIEEAINTKLKDSFSQDQVLELVQFRKNNSSLFSKGWHNFSLKLMMELIPELYETSEEQMTILTRLGKQKSKEISKRTKYIDEKELTEEIYNPVVAKSVRQAIKIINEATKKHGIFDNIVIEMARENNEEDAKKDYIKRQKANQDEKNAAMEKAAFQYNGKKELPDSIFHGQKELATKIRLWHQQGEKCLYTGKNIPISDLIHNQYKYEIDHILPLSLSFDDSLSNKVLVLATANQEKGQRTPFQALDSMDDAWSYREFKSYVKESKLLGNKKKEYLLTEEDISKIEVKQKFIERNLIDTRYSSRVVLNALQDFYKAHKFDTTISVVRGQFTSQLRRKWGLEKSRETYHHHAVDALIIAASSQLRLWKKQNNPLIAYKEGQFVDSETGEIISLSDDEYKELVFKAPYDHFVDTLSSKTFEDSILFSYQVDSKFNRKISDATIYATRKAKLDKEKSEETYVLGKIKDIYSQAGYDAFIKIYNKDKSKFLMYHKDPQTFEKVIEEILRTYPSKELNDKNKEIPCNPFEKYRQENGPIRKYSKKSNGPEIKSLKYYDNKLGNHIDITPESSDNQVVLQSLKPWRTDVYFNHQTKKYELMGLKYSDLSFEKGSGKYSISNQKYNSIKRIEGIDEQSEFKFTLYKNDLILIKDSENNEQKLFRFNSRNDTAKHYIELKPYDKAKFDGEQELITILGNVAKGGRCLKGLNKSNISIFKVKTDVLGKKHIIKKEGDEPKLKF

SEQ ID NO: 770 - protein, 1026 aa, Streptococcus sp.
MNGLVLGLDIGIASVGVGILEKNSGKIIHANSRLFPAATADNNVERRKNRQARRLNRRKKHRGVRFQDLFEDYGLLTDFSKVSINLNPYRLRVDGLNQQLTNEELFIALKNIVKRRGISYLDDASEDGGAVSSDYGKAVEENRKLLAEQTPGQIQLERFEKYGQVRGDFTVVENGEKRRLINVFSTSAYRKEAEKILRKQQEFNNQITDEFIEDYLKILTGKRKYYHGPGNEKSRTDYGRFRTDGTTLDNIFGVLIGKCTFYPNEYRASKSSYTAQEFNLLNDLNNLTVPTETKKLSEEQKKVIVEYAKEAKTLGASTLLKYIVKMIDASVDQISGYRVDVNNKPEMHTFEVYRKMQSLETISVGELSRNVLDELAHILTLNTEREGIEEAINSKLMGVFSQDQVLELVQFRKNNSSLFSKGWHNFSLKLMMELIPELYETSEEQMTILTRLGKQKSKETSKRTKYIDEKELTEEIYNPVVAKSVRQAIKIINEATKKHGIFDNIVIEMARENNEEDAKKDYIKRQKANQDEKNAAMEKAAFQYNGKKELPGNIFNGHKELATKIRLWHQQGEKCLYTGKTIPISDLIHNQYKYEIDHILPLSLSFDDSLSNKVLVHATANQEKGQRTPFQALDSMDDAWSYREFKSYVKDLKSLSNKKKDYLLTEEDISKIEVKQKFIERNLVDTRYSSRVVLNALQDFYKSHQFDTTISVVRGQFTSQLRRKWGLEKSRETYHHHAVDALIIAASSQLRLWKKQNNPLITYKEGQFIDSQTGEIISLTDDEYKELVFKAPYDHFVDTLHSKTFEDGILFSYQVDSKYNRKISDATIYATRKAKLDKDKSEETYVLGKIKDIYSQAGYDAFIKIYNKDKRKFLMYHKDPQTFEKVIEEILRTYPSKERNDKNKEVPCNPFEKYRQENGPIRKYSKKGNGPEIKCLKYYDNKLGNYIDISPDGSDNQVVLQSLKPWRTDVYFNHQTKKYELMGLKYSDLSFEKGSGKYSISNEKYNSIKRIEGVNEQSEFKFTLYK

SEQ ID NO: 771 - protein, 1377 aa, Streptococcus sp.
MNNKPYSIGLDIGTNSVGWSVITDDYKVPSKKMKVLGNTDKRFIKKNLIGALLFDEGTTAEARRLKRTARRRYTRRKNRLRYLQEIFAEEMSKVDSSFFHRLDDSFLIPEDKRGSKYPIFATLVEEKEYHKQFPTIYHLRKQLADSKEKADLRLIYLVLAHMIKYRGHFLYEEAFDIKNNDIQKIFNEFISIYDNTFEGSSLSGQNAQVETIFTDKISKSAKRERVLKLFPDEKSTGLFSEFLKLIVGNQADFKKHFDLEEKAPLQFSKDTYDEDLENLLEQIGDDFADLFVAAKKLYDAILLSGILTVTDPSTKAPLSASMIERYENHQKDLAVLKQFIKTNLPEKYVEVFSDQSKDGYAGYIDGKTTQEAFYKYIKNLLSKFDGADYFLDKIEREVFLRKQRTFDNGSIPHQIHLQEMNTILRRQGEHYPFLKENKEKIEKILTFRIPYHVGPLARGNRDFAWLTRNSDQAIRPWNFEEIVDKASSAEDFINKMTNYDLYLPEEKVLPKHSLLYETFAVYNELTKVKFIAEGMRDYQFLDSGQKKKIINQLFKKKRKVTEDDIIDCLQKIDNYDGIELKGIEKQFNASLSTYHDILKIIRDKEFMDDPKNGDILENVIHTLTIFEDREMIKQRLAQYNSIFDEKVIKALSRKHYTGWGKLSAKLIDGIRDKQTGKTILDYLMDDGKSNRNFMQLIKDDELSFTEIIQKAQVVGDTDNLRQVVQNLPGSPAIKKGILQSIKIVDELVKVMGHAPESIVIEMARENQTTARGKKNSQQRYKRIEDSLKNLASGLDSNILKENPTDNIQLQNDRLFLYYLQNGKDMYTGEALNINQLSSYDIDHIIPQAFIKDDSLDNRVLTSSKDNRGKSDNVPSLEVVEKMKAFWQQLLDSKLISERKYNNLTKAERERGGLNELDKVGFIKRQLVETRQITKHVAQILDARFNKEVTEKNKKNRNVKIITLKSNMVSNFRKEFGLYKVREINDYHHAHDAYLNAVVAKAILKKYPKLEPEFVYGDYQKYDLKRYISRSKDPKEVEKATEKYFFYSNLLNFFKEEVHYADGTIVKRENIEYSKDTGEIAWNKEKDFATIKKVLSLPQVNIVKKTEEQTVGQNGGLFDNNIVSKKKVVDASKLIPIKSGLSPEKYGGYARPTIAYSVLVTYKQNNKIKNTMVGIPVLTKLEFERDPNLYLRNLGINNVSHVIKLVKYTVLEFKHKYGTYRRFIVSNQELKRANQIFVTTKQMKLISQYTTLDKNEHDSLLKNNQQLIQSIWNQFLEFMLATDLVNKKQYDELILTNNQTIEECRNIMNRVITTLSFTNINAGQKKIIFDDTLSLPIKRWQFTDSDKMVKKIIESTLIHQSITGLYETRIDLSKLGED

SEQ ID NO: 772 - protein, 1371 aa, Streptococcus sp.
MNNNNYSIGLDIGTNSVGWAVITDDYKVPSKKMRVLGNTDKRFIKKNLIGALLFDEGTTAEDRRLKRTARRRYTRRKNRLRYLQEIFAEEMSKVDSSFFHRLDDSFLVPEDKSGSKYPIFATLAEEKEYHKKFPTIYHLRKHLADSKEKADLRLIYLALAHITKYRGHFLYEEAFDIKNNDIQKIFNEFINIYDNTFEGSSLSGQNAQVEAIFTGKISKSVKREHVLKLFPDEKSTGLFSEFLKLIVGNQADFKKHFDLEEKASLQFSKDTYDEDLENLLGQIGDDFADLFLVAKKLYDAILLSGILTVTDPSTKAPLSASMIERYENHQEDLAALKQFIKNNLPEKYAEVFSDQSKDGYAGYIDGKTTQEAFYKYIKNLLSKFEGADYFLDKIEREDFLRKQRTFDNGSIPHQIHLQEMNAILRRQGEHYPLLKENKEKIEKILTFRIPYYVGPLARGNRDFAWLTRNSDQAIRPWNFEEIVDKASSAESFINKMTNYDLYLPEEKVLPKHSLLYETFAVYNELTKVKFIAEGLRDYQFFDSGQKKQIVNQLFKEKRKVTEKDIIHYLHNVDGYDGIELKGIEKQFNASLSTYHDLLKIIKDKEFMDNHKNQEILENIVHTLTIFEDREMIKQRLAQYDSIFDEKVIKALTRRHYTGWGKLSAKLINGICDKKTGKTILDYLIDDGYNNRNFMQLINDDGLSFKEIIQKAQVVGKTDDLTQVVRELSGSPAIKKGILQSIKIVDELVKIMGYAPESIVIEMARENQTTAKGKKNSQQRYKRIEDALKNLAPGLDSTISKENPTDNIQLQNDRLFLYYLQNGKDMYTGEALDINQLSSYDIDHIIPQAFIKDDSLDNRVLTSSKDNRGKSDNVPSLEVVKKRKAFWQQLLDSKLISERKFNNLTKAERGGLDERDKVGFIKRQLVETRQITKHVARILDARFNTEVSEKNQKIRSVKIITLKSNLVSNFRKEFKLYKVREINDYHHAHDAYLNAVVAKAILKKYPKLEPEFVYGDYQKYDLKRYISKSKDPKEVEKATEKYFFYSNLLNFFKEEVHYADGTIVKRENIEYSKDTGEIAWNKEKDFVTIKKVLSYPQVNIVKKREVQTGGFSKESILPKGNSDKLIPRKTKDILWDTTKYGGFDSPVIAYSILLIADIEKGKAKKLKTVKTLVGITIMEKAAFEKNPITFLENKGYHNVRKENILCLPKYSLFELENGRRRLLASAKELQKGNEIVLPVYLTTLLYHSKNVHKLDEPEHLEYIQKHRYEFKDLLNLVSEFSQKYVLAEANLEKIKSLYVDNEQADIEILANSFINLLTFTALGAPAAFKFFGKDVDRKRYTTVSEILNATLIHQSITGLYETRIDLSKLGED

SEQ ID NO: 773 - protein, 1139 aa, Streptococcus sp.
MSDLVLGLDIGIGSVGVGILNKVTGEIIHKNSRIFPAAQAENNLERRTNRQGRRLTRRKKHRRVRLNHLFEESGLITDFTKVSINLNPYQLRVKGLTAELSNEELFIALKNMVKHRGISYLDDASDDGNSSVGDYAQIVKENSKQLETKTPGQIQLERYQKYGQLRGDFTVEEDGRKHRLINVFPTSAYHAEALRILQTQQEFNPQITDEFINSYLEILTGKRKYYHGPGNEKSRTDYGKYTTKKDAQGQYITLNNIFGILIGKCTFYPEEYRAAKASYTAQEFNLLNDLNNLTVPTETKKLSEEQKYQIITYVKNEKAMGPAKLFKYIAKLLSCDVADIKGYRIDKSDKAEIHTFEAYRKMKTLETLDVKKMAREELDKLAYVLTLNTEREGIQEALDHEFADGTFSQEQVDELVQFRKANSSIFGKGWHSFSVKLMMELIPELYATSEEQMTILTRLGKQKTTSSSNKTKYIDEKQLTEEIYNPVVAKSVRQAIKIVNAAIKKYGDFDNIVIEMARETNEDDEKKAIQKIQKANKAEKDAAMRKAANQYNGKAELPHSVFHGHKQLATKIRLWHQQGERCLYTGKTISIHDLINNPNQFEIDHILPLSITFDDSLANKVLVYATANQEKGQRTPYQALDSMDDAWSFRELKAFVRESKALSNKKKEYLLTEEDISKFDVRKKFIERNLVDTRYASRVVLNALQEHFRTHKIDTKVSVVRGQFTSQLRRHWGIEKTRDTYHHHAVDALIIAASSQLNLWKKQKNTLVSYSEDQLLDIETGELISDDEYKESVFKAPYQHFVDTLKSKEFEDSILFSYQVDSKFNRKISDATIYATRKAKLDKEKKEYTYTLGKIKDIYALGTKTPSKTGFYKFLDLYKKDKSQFLMYQKDRRTWDEVIEKILEQYRPFKEKDKNGKEVDFNPFEKYRIENGPIRKYSRKGNGPEIKSLKYYDNLLGRFVDITPSESKNPVALLSLNPWRTDVYYNTETRKYEFLGLKYADLCFEKGGSYGISKVKYNKIREKEGIGKNSEFKFTLYKNDLILIKDTETNRQQIFRFWSRTGKDNPKSFEKHKLELKPYEKTRFEKGEELKVLGKVPPSSNRLQKNMQIENLSIYKVRTDVLGNQHIIKNEGDKPKLDF

SEQ ID NO: 774 - protein, 1375 aa, Streptococcus sp.
MSNKSYSIGLDIGTNSVGWAVITDDYKVPSKKMKVLGNTDKHFIKKNLIGALLFDEGTTAEDRRLKRTARRRYTRRKNRLRYLQEIFSQEISKVDSSFFHRLDDFFLVPEDKRGSKYPIFATLVEEKEYHKKFPTIYHLRKHLADSKEKTDLRLIYLALAHMIKYRGHFLYEESFDIKNNDIQKIFSEFISIYDNTFEGKSLSGQNAQVEAIFTDKISKSTKRERVLKLFPDEKSTGLFSEFLKLIVGNQADFKKHFDLEEKAPLQFSKDTYDEDLENLLGQIGDDFADLFLVAKKLYDAILLSGILTVKDLSTKAPLSASMIERYENHQKDLAALKQFIQNNLQEKYDEVFSDQSKDGYAGYIDGKTTQEAFYKYIKNLLSKFEGADYFLDKIEREDFLKKQRTFDNGSIPHQIHLQEMNAIIRRQGEHYPFLQENKEKIEKILTFRIPYYVGPLARGNGDFAWLTRNSDQAIRPWNFEEIVDQASSAEDFINKMTNYDLYLPEEKVLPKHSLLYETFAVYNELTKVKFIAEGLTRYQFLDKKQKKDIFDTFFKAENKRKVTEKDIIHYLHNVDGYDGIELKGIEKQFNASLSTYHDLLKIIKDKAFMDDSKNEEILENIIHTLTIFEDREMIKQRLAQYDSLFDEKVIKALTRRHYTGWGKLSAKLINGIRDKKSGKTILDYLIDDGEINRNFMQLIHDDGLSFKEIIQKAQVFGKTNDVKQVVQELPGSPAIKKGILQSIKIVDELVKVMGHAPESIVIEMARENQTTARGKKNSQQRYKRIEDSLKNLASGLDSNILKENPTDNIQLQNDRLFLYYLQNGRDMYTGKPLEINQLSNYDIDHIIPQAFIKDDSLDNRVLTSSKDNRGKSDNVPSLEVVEKMKAFWQQLLDSKLISERKFNNLTKAERERGGLNELDKVGFIKRQLVETRQITKHVAQFLDARFNKEVTEKDKKNRNVKIITLKSNLVSNFRKEFGLYKVREINDYHHAHDAYLNAVLAKAILKKYPKLEPEFVYGDYQKYDLQRYISKSREPKEVEKATQKYFFYSNLLNFFKEEVHYADGTIVKRENIEYSKDTGEIAWNKEKDFATVKKVLSLPQVNIVKKTEVQTGGFSKESILPKGNSDKLIPRKTKEILWDTTKYGGFDSPVIAYSILLIADIEKGKAKKLKTVKTLVGITIMEKATFEKNPITFLENKGYHNVRKENILCLPKYSLFELESGRRRMLASAKELQKGNEIVLPVYLTTLLYHSKNVHKLDEPEHLEYIQKHRYEFKDLLNLVSEFSQKYVLADANLEKIKNLYADNEQADIEILANSFINLLTFTALGAPAAFKFLGKDVDRKRYTTVSEILNATLIHQSITGLYETRIDLSKLGED

SEQ ID NO: 775 - protein, 206 aa, Streptococcus sp.
RTPFQALDSMDDAWSYREFKSYVKESKLLGNKKKEYLLTEEDISKIEVKQKFIERNLIDTRYSSRVVLNALQDFYKAHKFDTTISVVRGQFTSQLRRKWGLEKSRETYHHHAVDALIIAASSQLRLWKKQNNPLIAYKEGQFVDSETGEIISLSDDEYKELVFKAPYDHFVDTLSSKTFEDSILFSYQVDSKFNRKISDATIYATR

SEQ ID NO: 776 - protein, 1122 aa, Streptococcus suis
MSNGKILGLDIGIASVGVGVIDAQTGEIIHASSRIFPSANAANNAERRTFRGSRRLIRRKKHRIKRLDDLFNDFHINLDGEMSTDNPYVLRVKGLSQKLTVEELYISIKNIMKRRGISYLDDAESDNEAGRSDYAKAIERNRQLLTSKTPGEIQLERLEKYGQLRGNFTIIDEEGQSQQIINVFSTSDYVKEVEKILDCQKMYHKFISDEFCDKLIELLREKRKYYVGPGNEKSRTDYGIYRTDGTTLENLFGILIGKCTFYPDQYRSSRASYTAQEFNFLNDLNNLTVPTETKKLSQEQKEFLVNYAKETSVLGAGKILQQIAKLADCKVEDIRGYRLDNKDKPELHTFETYRAMKGLVPLVDIGVLSREQLDILADILTLNTDFEGIREALKKQLPNVFDEKQVKGLASFRKSKSQLFAKGWHNLSQKIMLEVIPELYATSDEQMTILTRLGKFEKSSVAEYPSSINVDEITDEIYNPVVAKSIRQTIKIINASIKKWDEFDQIVIEMPRDRNEDEEKKRIADGQKANAKEKADSILRAAELYCAGKVLPDYVYNGHNQLATKIRLWYQQGERCIYTGQPISIHDLIHNQNQYEIDHILPLSLTFDDSLSNKVLVLATANQEKAQRTPYNYLKSATSAWSYREFKDYVTKRKGIGKKKCEYLTFEEDINGFEVRSKFIQRNLVDTRYASKVILNALQDYFKISGIQTKVSVVRGQFTSQLRHKWGIEKTRETYHHHAVDALIIAASSQLRLWKKQESPLVVDYQEGRQVDLETGEILELTDEQYKELVYQPPYQGFVNTISSSAFDNEILFSYQVDSKVNRKISDATIYATRNAQLGKDKTEGIYVLGKIKDIYTQAGYEAFLKRYTKDKTSFLMYHKDLDTWEKVIEIILRDYREYDEKGKEIGNPFERYRRENGYVKKYSRKGNGTAIKSLKYYDNKLGNHIDITPENSRNAVVLQSLKPWRTDVYFNKETGKYEFLGIKYSDLSFEKGTGEYGISQEKYDSIKIAEGVAKKSIFKFTLYKQDLLFIKDIENNFGKLLRFTSKNDTSKHYVELKPYDKNKFGTEEPLLPVLGNVAKSGQCIKGLNKSNISIYKVRTDILGYRHFIKQEGEHPQLKFKK

SEQ ID NO: 777 - protein, 1381 aa, Streptococcus suis
MVKKKYAIGIDIGTNSVGWSIVTDDYKVPSKKMKVFGNTEKRYIKKNLLGTLLFDEGNTAENRRLKRTARRRYTRRRNRILYLQEIFAEEINKIDDSFFQRLDDSFLIVEDKQGSKHPIFGTLQEEKEYHKQFPTIYHLRKQLADSSQKADIRLIYLALAHIIKYRGHFLFEGDLKSENKDVQHLFNDFVEMFDKTVEGSYLSENLPNVADVLVEKVSKSRRLENILHYFPNEKKNGLFGNFLALALGLQPNFKTNFELAEDAKIQFSKETYEEDLEELLGKIGDDYADLFIATKSLYDGILLAGILSTTDSTTKAPLSSSMVNRYEEHQKDLALLKNFIHQNLSDSYKEVFNDKLKDGYAGYIEGKTTQENFYRFIKKAIEKIEGSNYFIDKIDREDFLRKQRTFDNGSIPHQIHLQEMHAIIRRQAEFYPFLVENQDKIEKILTFRIPYYVGPLARGKSEFAWLNRKSDEKIRPWNFDEMVDKETSAENFITRMTNYDRYLPDQKVLPKHSLLYEKFAVYNELTKVKFIAEGMRDYQFLDSGQKKDIVKTLFKTKRKVTAKDIKAYLENSNGYAGVELKGLEEQFNASLPTYHDLLKILRDKAFIDAEENQEILEDIVLTLTLFEDREMIRKRLEKYKDILTEEQRKKLERRHYTGWGRLSAKLINGILDKVTRKTILGYLIDDGTSNRNFMQLINDDTLSFVDEIRLAQGSGEAEDYRAEVQNLAGSPAIKKGILQSLKIVDELIEVMGYEPEHIVVEMARENQFTNQGRRNSQQRINRLENALKDFGSKILEEQKPYGVSKVNNIHLQSDRLFLYYLQNGKDMYTDEELDIDHLSEYDIDHIIPQAFIKDDSLDNKVLTKSAKNRGKSDDVPSMEIVHNRKNFWRQLLKSKLISQRKFDNLTKAERGGLTNEDKARFIQRQLVETRQITKHVARMLDTRFNTKLDEAGNRIRDPKVNIITLKSNLVSQFRKDYQLYKIREINNYHHAHDAYINAVVATALLKKYPQLAPEFVYGEYPTYNSYNSRKSATEKVLFYSNIMNFFKRIVVHSKTGEVRIRPVIEVNKETGEIVWDKKSDFRTVRKVLSYPQVNVVKKTEVQNHGLDRGKPKGFYNANLSPRPKEGSVENLVPAKQSFDTKRYGGYAGISNSYAVLVNGIIEKGKKKSKAEVTEFQGISILARKDFDKNPKQYLLNLGYKDIKSIIKLPKYSLFELENGSRRMLASILSTNNKRGEIHKGNEMYLPDKFVTLLYHAMRVNRTLEPGHKKYVETHRHVFDELLIYILEYNEKIVGAKANGKRIVEAYSARKDTDNLEELCNSFINLLNLTALGSAVDFEFLGTKIPRYRDYTPSSLLKATLIHQSVTGLYETRIDLSKLGGD

SEQ ID NO: 778 - protein, 39 aa, Streptococcus thermophilus
GRCIKGLGKSNISIYKVRTDVLGNQHIIKNEGDKPKLDF

SEQ ID NO: 779 - protein, 302 aa, Streptococcus thermophilus
MIRRKKHRIVRLNRLFEESGLITDFTKISINLNPYQLRVKGLTDELSNEELFIALKNMVKHRGISYLDDASDDGNSSVGDYAQIVKENSKQLETKTPGQIQLERYQTYGQLRGDFTVEKDGKKHRLINVFPTSAYRSEALRILQTQQEFNPQITDEFINRYLEILTGKRKYYHGPGNEKSRTDYGRYRTSGETLDNIFGILIGKCTFYPDEFRAAKASYTAQEFNLLNDLNNLTVPTETKKLSKEQKNQIINYVKNEKAMGPAKLFKYIAKLLSCDVADIKGYRIDKSGKAERFILSKPIEK

SEQ ID NO: 780 - protein, 1121 aa, Streptococcus thermophilus
MSDLVLGLDIGIGSVGVGILNKVTGEIIHKNSRIFPAAQAENNLVRRTNRQGRRLTRRKKHRIVRLNRLFEESGLITDFTKISINLNPYQLRVKGLTDELSNEELFIALKNMVKHRGISYLDDASDDGNSSVGDYAQIVKENSKQLETKTPGQIQLERYQTYGQLRGDFTVEKDGKKHRLINVFPTSAYRSEALRILQTQQEFNPQITDEFINRYLEILTGKRKYYHGPGNEKSRTDYGRYRTSGETLDNIFGILIGKCTFYPDEFRAAKASYTAQEFNLLNDLNNLTVPTETKKLSKEQKNQIINYVKNEKAMGPAKLFKYIAKLLSCDVADIKGYRIDKSGKAEIHTFEAYRKMKTLETLDIEQMDRETLDKLAYVLTLNTEREGIQEALEHEFADGSFSQKQVDELVQFRKANSSIFGKGWHNFSVKLMMELIPELYETSEEQMTILTRLGKQKTTSSSNKTKYIDEKLLTEEIYNPVVAKSVRQAIKIVNAAIKEYGDFDNIVIEMARETNEDDEKKAIQKIQKANKDEKDAAMLKAANQYNGKAELPHSVFHGHKQLATKIRLWHQQGERCLYTGKTISIHDLINNSNQFEVDHILPLSITFDDSLANKVLVYATANQEKGQRTPYQALDSMDDAWSFRELKAFVRESKTLSNKKKEYLLTEEDISKFDVRKKFIERNLVDTRYASRVVLNALQEHFRAHKIDTKVSVVRGQFTSQLRRHWGIEKTRDTYHHHAVDALIIAASSQLNLWKKQKNTLVSYSEDQLLDIETGELISDDEYKESVFKAPYQHFVDTLKSKEFEDSILFSYQVDSKFNRKISDATIYATRQAKVGKDKADETYVLGKIKDIYTQDGYDAFMKIYKKDKSKFLMYRHDPQTFEKVIEPILENYPNKQMNEKGKEVPCNPFLKYKEEHGYIRKYSKKGNGPEIKSLKYYDSKLGNHIDITPKDSNNKVVLQSVSPWRADIYFNNTTGKYEILGLKYADLQFEKGTGTYKISQEKYNDIKKKEGVDSDSEFKFTLYKNDLLLVKETETKEQQLFRFLSRTMPKQKHYVELKPYDKQKFEGGEALIKVLGNVANGGQCIKGLGKSNISIYKVRTDVLGNQHIIKNEGDKPKLDF

SEQ ID NO: 781 - protein, 1121 aa, Streptococcus thermophilus
MSDLVLGLDIGIGSVGVGILNKVTGEIIHKNSRIFPAAQAENNLVRRTNRQGRRLTRRKKHRIVRLNRLFEESGLITDFTKISINLNPYQLRVKGLTDELSNEELFIALKNMVKHRGISYLDDASDDGNSSVGDYAQIVKENSKQLETKTPGQIQLERYQTYGQLRGDFTVEKDGKKHRLINVFPTSAYRSEALRILQTQQEFNPQITDEFINRYLEILTGKRKYYHGPGNEKSRTDYGRYRTSGETLDNIFGILIGKCTFYPDEFRAAKASYTAQEFNLLNDLNNLTVPTETKKLSKEQKNQIINYVKNEKAMGPAKLFKYIAKLLSCDVADIKEYRIDKSGKAEIHTFEAYRKMKTLETLDIEQMDRETLDKLAYVLTLNTEREGIQEALEHEFADGSFSQKQVDELVQFRKANSSIFGKGWHNFSVKLMMELIPELYETSEEQMTILTRLGKQKTTSSSNKTKYIDEKLLTEEIYNPVVAKSVRQAIKIVNAAIKEYGDFDNIVIEMARETNEDDEKKAIQKIQKANKDEKDAAMLKAANQYNGKAELPHSVFHGHKQLATKIRLWHQQGERCLYTGKTISIHDLINNSNQFEVDHILPLSITFDDSLANKVLVYATANQEKGQRTPYQALDSMDDAWSFRELKAFVRESKTLSNKKKEYLLTEEDISKFDVRKKFIERNLVDTRYASRVVLNALQEHFRAHKIDTKVSVVRGQFTSQLRRHWGIEKTRDTYHHHAVDALIIAASIQLNLWKKQKNTLVSYSEDQLLDIETGELISDDEYKESVFKAPYQHFVDTLKSKEFEDSILFSYQVDSKFNRKISDATIYATRQAKVGKDKADETYVLGKIKDIYTQDGYDAFMKIYKKDKSKFLMYRHDPQTFEKVIEPILENYPNKQINEKGKEVPVNPFLKYKEEHGYIRKYSKKGNGPEIKSLKYYDSKLGNHIDITPKDSNNKVVLQSVSPWRADVYFNKTTGKYEILGLKYADLQFEKGTGTYKISQEKYNDIKKKEGVDSDSEFKFTLYKNDLLLVKDTETKEQQLFRFLSRTMPKQKHYVELKPYDKQKFEGGEALIKVLGNVANSGQCKKGLGKSNISIYKVRTDVLGNQHIIKNEGDKPKLDF

SEQ ID NO: 782 - protein, 1121 aa, Streptococcus thermophilus
MSDLVLGLDIGIGSVGVGILNKVTGEIIHKNSRIFPAAQAENNLVRRTNRQGRRLTRRKKHRRVRLNRLFEESGLITDFTKISINLNPYQLRVKGLTDELSNEELFIALKNMVKHRGISYLDDASDDGNSSVGDYAQIVKENSKQLETKTPGQIQLERYQTYGQLRGDFTVEKDGKKHRLINVFPTSAYRSEALRILQTQQEFNPQITDEFVNRYLEILTGKRKYYHGPGNEKSRTDYGRYRTNGETLDNIFGILIGKCTFYPEEFRAAKASYTAQEFNLLNDLNNLTVPTETKKLSKEQKNQIINYVKNEKAMGPAKLFKYIAKLLSCDVADIKGYRIDKSGKAEIHTFEAYRKMKTLETLDIEQMDRETLDKLAYVLTLNTEREGIQEALEHEFADGSFSQKQVDELVQFRKANSSIFGKGWHNFSVKLMMELIPELYETSEEQMTILKRLGKQKTTSSSNKTKYIDEKLLTEEIYNPVVAKSIRQAIKIVNAAIKEYGDFDNIVIEMARETNEDDEKKAIQKIQKANKDEKDAAMLKAANQYNGKAELPHSVFHGHKQLATKIRLWHQQGERCLYTGKTISIHDLINNPNQFEVDHILPLSITFDDSLANKVLVYATANQEKGQRTPYQALDSMDDAWSFRELKAFVRESKTLSNKKKEYLLTEEDISKFDVRKKFIERNLVDTRYASRVVLNALQEHFRAHKIDTKVSVVRGQFTSQLRRHWGIEKTRDTYHHHAVDALIIAASSQLNLWKKQKNTLVSYSEDQLLDIETGELISDDEYKESVFKAPYQHFVDTLKSKEFEDSILFSYQVDSKFNRKISDATIYATRQAKVGKDKKDETYVLGKIKDIYTQDGYDAFMKIYKKDKSKFLMYRHDPQTFEKVIEPILENYPNKEMNEKGKEVPCNPFLKYKEEHGYIRKYSKKGNDPEIKSLKYYDSKLGNHIDITPKDSNNKVVLQSVSPWRADVYFNKTTGKYEILGLKYADLQFEKGTGTYKISQEKYNDIKKKEGVDSDSEFKFTLYKNDLLLVKDTETKEQQLFRFLSRTMPKQKHYVELKPYDKQKFEGGEALIKVLGNVANSGQCKKGLGKSNISIYKVRTDVLGNQHIIKNEGDKPKLDF

SEQ ID NO: 783 - protein, 1122 aa, Streptococcus thermophilus
MSDLVLGLDIGIGSVGVGILNKVTGEIIHKNSRIFPAAQAENNVERRTNRQGRRLTRRKKHRRVRLNRLFEESGLITDFTKISINLNPYQLRVRGLTDELSNEELFIALKNMVKHRGISYLDDASDDGNSSVGDYAQIVKENSKQLETKTPGQIQLERYQTYGQLRGDFTVEKDGKKHRLINVFPTSAYRSEALRILQTQQEFNSQITDEFINRYLEILTGKRKYYHGPGNEKSRTDYGRYRTSGETLDNIFGILIGKCTFYPEEFRAAKASYTAQEFNLLNDLNNLTVPTETKKLSKEQKNQIINYVKNEKAMGPAKLFKYIAKLLSCDVADIKGYRIDKSGKAEIHTFEAYRKMKTLETLDIEQMDRETLDKLAYVLTLNTEREGIQEALEHEFADGSFSQKQVDELVQFRKASSSIFGKGWHNFSVKLMMELIPELYETSEEQMTILTRLGKQKTTSSSNKTKYIDEKLLTEEIYNPVVAKSVRQAIKIVNAAIKEYGDFDNIVIEMARETNEDDEKKAIQKIQKANKDEKDAAMLKAANQYNGKAELPHSVFHGHKQLATKIRLWHQQGERCLYTGKTISIHDLINNPNQFEVDHILPLSITFDDSLANKVLVYATANQEKGQRTPYQALDSMDDAWSFRELKAFVRESKTLSNKKKEYLLTEEDISKFDVRKKFIERNLVDTRYASRVVLNALQEHFRAHKIDTKVSVVRGQFTSQLRRHWGIEKTRDTYHHHAVDALIIAASSQLNLWKKQKNTLVSYSEDQLLDIETGELISDDEYKESVFKAPYQHFVDTLKSKEFEDSILFSYQVDSKFNRKLSDATIYATRQAKVGKDKKDETYVLGKIKDIYTQDGYDAFMKIYKKDKSKFLMYRHDPQTFEKVIEPILENYPNKEMNEKGKEVPCNPFLKYKEEHGYIRKYSKKGNGPEIKSLKYYDSKLLGNPIDITPENSKNKVVLQSLKPWRADVYFNKTTGKYEILGLKYADLQFEKKTGTYKISQEKYNGIMKEEGVDSDSEFKFTLYKNDLLLVKDTETKEQQLFRFLSRTMPNVKYYVELKPYSKDKFEKNESLIEILGSADKSGRCIKGLGKSNISIYKVRTDVLGNQHIIKNEGDKPKLDF

SEQ ID NO: 784 - protein, 1388 aa, Streptococcus thermophilus
MTKPYSIGLDIGTNSVGWAVITDNYKVPSKKMKVLGNTSKKYIKKNLLGVLLFDSGITAEGRRLKRTARRRYTRRRNRILYLQEIFSTEMATLDDAFFQRLDDSFLVPDDKRDSKYPIFGNLVEEKAYHDEFPTIYHLRKYLADSTKKADLRLVYLALAHMIKYRGHFLIEGEFNSKNNDIQKNFQDFLDTYNAIFESDLSLENSKQLEEIVKDKISKLEKKDRILKLFPGEKNSGIFSEFLKLIVGNQADFRKCFNLDEKASLHFSKESYDEDLETLLGYIGDDYSDVFLKAKKLYDAILLSGFLTVTDNETEAPLSSAMIKRYNEHKEDLALLKEYIRNISLKTYNEVFKDDTKNGYAGYIDGKTNQEDFYVYLKNLLAEFEGADYFLEKIDREDFLRKQRTFDNGSIPYQIHLQEMRAILDKQAKFYPFLAKNKERIEKILTFRIPYYVGPLARGNSDFAWSIRKRNEKITPWNFEDVIDKESSAEAFINRMTSFDLYLPEEKVLPKHSLLYETFNVYNELTKVRFIAESMRDYQFLDSKQKKDIVRLYFKDKRKVTDKDIIEYLHAIYGYDGIELKGIEKQFNSSLSTYHDLLNIINDKEFLDDSSNEAIIEEIIHTLTIFEDREMIKQRLSKFENIFDKSVLKKLSRRHYTGWGKLSAKLINGIRDEKSGNTILDYLIDDGISNRNFMQLIHDDALSFKKKIQKAQIIGDEDKGNIKEVVKSLPGSPAIKKGILQSIKIVDELVKVMGGRKPESIVVEMARENQYTNQGKSNSQQRLKRLEKSLKELGSKILKENIPAKLSKIDNNALQNDRLYLYYLQNGKDMYTGDDLDIDRLSNYDIDHIIPQAFLKDNSIDNKVLVSSASNRGKSDDFPSLEVVKKRKTFWYQLLKSKLISQRKFDNLTKAERGGLLPEDKAGFIQRQLVETRQITKHVARLLDEKFNNKKDENNRAVRTVKIITLKSTLVSQFRKDFELYKVCEINDFHHAHDAYLNAVIASALLKKYPKLEPEFVYGDYPKYNSFRERKSATEKVYFYSNIMNIFKKSISLADGRVIERPLIEVNEETGESVWNKESDLATVRRVLSYPQVNVVKKVEEQNHGLDRGKPKGLFNANLSSKPKPNSNENLVGAKEYLDPKKYGGYAGISNSFAVLVKGTIEKGAKKKITNVLEFQGISILDRINYRKDKLNFLLEKGYKDIELIIELPKYSLFELSDGSRRMLASILSTNNKRGEIHKGNQIFLSQKFVKLLYHAKRISNTINENHRKYVENHKKEFEELFYYILEFNENYVGAKKNGKLLNSAFQSWQNHSIDELCSSFIGPTGSERKGLFELTSRGSAADFEFLGVKIPRYRDYTPSSLLKDATLIHQSVTGLYETRIDLAKLGEG

SEQ ID NO: 785 - protein, 1388 aa, Streptococcus thermophilus
MTKPYSIGLDIGTNSVGWAVITDNYKVPSKKMKVLGNTSKKYIKKNLLGVLLFDSGITAEGRRLKRTARRRYTRRRNRILYLQEIFSTEMATLDDAFFQRLDDSFLVPDDKRDSKYPIFGNLVEEKAYHDEFPTIYHLRKYLADSTKKADLRLVYLALAHMIKYRGHFLIEGEFNSKNNDIQKNFQDFLDTYNAIFESDLSLENSKQLEEIVKDKISKLEKKDRILKLFPGEKNSGIFSEFLKLIVGNQADFRKCFNLDEKASLHFSKESYDEDLETLLGYIGDDYSDVFLKAKKLYDAILLSGFLTVTDNETEAPLSSAMIKRYNEHKEDLALLKEYIRNISLKTYNEVFKDDTKNGYAGYIDGKTNQEDFYVYLKNLLAEFEGADYFLEKIDREDFLRKQRTFDNGSIPYQIHLQEMRAILDKQAKFYPFLAKNKERIEKILTFRIPYYVGPLARGNSDFAWSIRKRNEKITPWNFEDVIDKESSAEAFINRMTSFDLYLPEEKVLPKHSLLYETFNVYNELTKVRFIAESMRDYQFLDSKQKKDIVRLYFKDKRKVTDKDIIEYLHAIYGYDGIELKGIEKQFNSSLSTYHDLLNIINDKEFLDDSSNEAIIEEIIHTLTIFEDREMIKQRLSKFENIFDKSVLKKLSRRHYTGWGKLSAKLINGIRDEKSGNTILDYLIDDGISNRNFMQLIHDDALSFKKKIQKAQIIGDEDKGNIKEVVKSLPGSPAIKKGILQSIKIVDELVKVMGGRKPESIVVEMARENQYTNQGKSNSQQRLKRLEKSLKELGSKILKENIPAKLSKIDNNALQNDRLYLYYLQNGKDMYTGDDLDIDRLSNYDIDHIIPQAFLKDNSIDNKVLVSSASNRGKSDDFPSLEVVKKRKTFWYQLLKSKLISQRKFDNLTKAERGGLLPEDKAGFIQRQLVETRQITKHVARLLDEKFNNKKDENNRAVRTVKIITLKSTLVSQFRKDFELYKVREINDFHHAHDAYLNAVIASALLKKYPKLEPEFVYGDYPKYNSFRERKSATEKVYFYSNIMNIFKKSISLADGRVIERPLIEVNEETGESVWNKESDLATVRRVLSYPQVNVVKKVEEQNHGLDRGKPKGLFNANLSSKPKPNSNENLVGAKEYLDPKKYGGYAGISNSFAVLVKGTIEKGAKKKITNVLEFQGISILDRINYRKDKLNFLLEKGYKDIELIIELPKYSLFELSDGSRRMLASILSTNNKRGEIHKGNQIFLSQKFVKLLYHAKRISNTINENHRKYVENHKKEFEELFYYILEFNENYVGAKKNGKLLNSAFQSWQNHSIDELCSSFIGPTGSERKGLFELTSRGSAADFEFLGVKIPRYRDYTPSSLLKDATLIHQSVTGLYETRIDLAKLGEG

SEQ ID NO: 786 - protein, 595 aa, Streptococcus thermophilus
MVQFRKANSSIFGKGWHNFSVKLMMELIPELYETSEEQMTILKRLGKQKTTSSSNKTKYIDEKLLTEEIYNPVVAKSVRQAIKIVNAAIKEYGDFDNIVIEMARETNEDDEKKAIQKIQKANKDEKDAAMLKAANQYNGKAELPHSVFHGHKQLATKIRLWHQQGERCLYTGKTISIHDLINNPNQFEVDHILPLSITFDDSLANKVLVYATANQEKGQRTPYQALDSMDDAWSFRELKAFVRESKTLSNKKKEYLLTEEDISKFDVRKKFIERNLVDTRYASRVVLNALQEHFRAHKIDTKVSVVRGQFTSQLRRHWGIEKTRDTYHHHAVDALIIAASSQLNLWKKQKNTLVSYSEDQFLDIETGELISDDEYKESVFKAPYQHFVDTLKSKEFEDSILFSYQVDSKFNRKISDATIYATRKAKLDKEKKEYTYTLGKIKDIYTQAGYDAFIKIYKKDKSKFLMYHHDPQTFEKVIEPILENYPNKEINEKGKEVPCNPFLKYKEEHGYIRKYSKKGNGPEIKSFKYYDNLLGRHIDITPKNSKNIVALRKLNPWRTDVYFNHETMKYEFLGLKYADISYKKSKNKAGDFLPK

SEQ ID NO: 787 - protein, 1388 aa, Streptococcus thermophilus]
MTKPYSIGLDIGTNSVGWAVITDNYKVPSKKMKVLGNTSKKYIKKNLLGVLLFDSGITAEGRRLKRTARRRYTRRRNRILYLQEIFSTEMATLDDAFFQRLDDSFLVPDDKRDSKYPIFGNLVEEKVYHDEFPTIYHLRKYLADSTKKADLRLVYLALAHMIKYRGHFLIEGEFNSKNNDIQKNFQDFLDTYNAIFESDLSLENSKQLEEIVKDKISKLEKKDRILKLFPGEKNSGIFSEFLKLIVGNQADFRKCFNLDEKASLHFSKESYDEDLETLLGYIGDDYSDVFLKAKKLYDAILLSGFLTVTDNETEAPLSSAMIKRYNEHKEDLALLKEYIRNISLKTYNEVFKDDTKNGYAGYIDGKTNQEDFYVYLKNLLAEFEGADYFLEKIDREDFLRKQRTFDNGSIPYQIHLQEMRAILDKQAKFYPFLAKNKERIEKILTFRIPYYVGPLARGNSDFAWSIRKRNEKITPWNFEDVIDKESSAEAFINRMTSFDLYLPEEKVLPKHSLLYETFNVYNELTKVRFIAESMRDYQFLDSKQKKDIVRLYFKDKRKVTDKDIIEYLHAIYGYDGIELKGIEKQFNSSLSTYHDLLNIINDKEFLDDSSNEAIIEEIIHTLTIFEDREMIKQRLSKFENIFDKSVLKKLSRRHYTGWGKLSAKLINGIRDEKSGNTILDYLIDDGISNRNFMQLIHDDALSFKKKIQKAQIIGDEDKGNIKEVVKSLPGSPAIKKGILQSIKIVDELVKVMGGRKPESIVVEMARENQYTNQGKSNSQQRLKRLEKSLKELGSKILKENIPAKLSKIDNNALQNDRLYLYYLQNGKDMYTGDDLDIDRLSNYDIDHIIPQAFLKDNSIDNKVLVSSASNRGKSDDFPSLEVVKKRKTFWYQLLKSKLISQRKFDNLTKAERGGLLPEDKAGFIQRQLVETRQITKHVARLLDEKFNNKKDENNRAVRTVKIITLKSTLVSQFRKDFELYKVREINDFHHAHDAYLNAVIASALLKKYPKLEPEFVYGDYPKYNSFRERKSATEKVYFYSNIMNIFKKSISLADGRVIERPLIEVNEETGESVWNKESDLATVRRVLSYPQVNVVKKVEEQNHGLDRGKPKGLFNANLSSKPKPNSNENLVGAKEYLDPKKYGGYAGISNSFAVLVKGTIEKGAKKKITNVLEFQGISILDRINYRKDKLNFLLEKGYKDIELIIELPKYSLFELSDGSRRMLASILSTNNKRGEIHKGNQIFLSQKFVKLLYHAKRISNTINENHRKYVENHKKEFEELFYYILEFNENYVGAKKNGKLLNSAFQSWQNHSIDELCSSFIGPTGSERKGLFELTSRGSAADFEFLGVKIPRYRDYTPSSLLKDATLIHQSVTGLYETRIDLAKLGEG

SEQ ID NO: 788 - protein, 1038 aa, Streptococcus vestibularis
MIDELSNEELFIALKNMVKHRGISYLDDASDDGNSSVGDYAQIVKENSKQLETKTPGQIQLERYQKYGQLRGDFTVEEDGKKHRLINVFPTSAYRAEALRILQTQQEFNSQITDEFINRYLEILTGKRKYYHGPGNEKSRTDYGRYRTSGETLDNIFGILIGKCTFYPEEFRAAKASYTAQEFNLLNDLNNLTVPTETKKLSEEQKNQIINYVKNEKAMGPAKLFKYIAKLLSCDIADIKGYRIDKSDKAEIHTFEAYRKMKTLETIDIEKMSREELDKLAYVLTLNTEREGIQEALEHEFVDGNFSQEQIDELVQFRKANSSIFGKGWHNFSVKLMMELIPELYATSEEQMTILTRLGKQKTTSSSNKTKYIDEKLLTEEIYNPVVAKSVRQAIKIVNAAIKEYGDFDNIVIEMARATNEDDEKKAIQKIQKANKDEKDAAMLKAANQYNGKAELPHSVFHGHKQLATKIRLWHQQGERCLYTGKTISIHDLINNPNQFEIDHILPLSITFDDSLANKVLVYATANQEKGQRTPYQALDSMDDAWSFRELKAFVRESKTLSNKKKEYLLTEEDISKFDVRKKFIERNLVDTRYASRVVLNALQEHFRAHKIDTKVSVVRGQFTSQLRRHWGIEKTRDTYHHHAVDALIIAASSQLNLWKKQKNTLVNYSENQLLDIETGELISDDEYKESVFKAPYQHFVDTLKSKEFEDSILFSYQVDSKFNRKISDATIYATRKAKLDKEKKEYTYTLGKIKDIYALGTKTPSKTGFYKFLDLYKKNKSQFLMYQKDRKTWDEVIEKILEQYRPFKEKDKNGKEVDFNPFEKYRIENGPIRKYSRKGNGPEIKSLKYYDNLLGRFVDITPSESKNPVALLSLNPWRTDVYYNTETRKYEFLGLKYADLCFEKGGSYGISKVKYNKIREKEGIGKNSEFKFTLYKNDLILIKDTETNRQQVFRFWSRTGKDNPKRFEKHKIELKPYEKARFEKGEELEVLGKVPPSSNQLQKNMQIENLSIFKVRTDVLGNQHIIKNEGDKPKLDF

SEQ ID NO: 789 - protein, 97 aa, Streptococcus vestibularis
MSDLVLGLDIGIGSVGVGILNKVTGEIIHKNSRIFPAAQAENNVERRTNRQGRRLTRRKKHRRVRLNHLFEESGLITDFTKVSINLNPYQLRVKIDR

SEQ ID NO: 790 - protein, 1084 aa, Subdoligranulum sp.
MKNTLYGIGLDIGVASVGWAVVGLNGTGEPVGLHRLGVRIFDKAEQPKTGESLAAPRRMARGMRRRLRRKALRRADVYALLERSGLSTREELAQMFEAGGLEDIYALRTRALDEPVGKAEFSRILLHLAQRRGFKSNRRTASDGEDGRLLAAVNENRRRMAQGGWRTVGEMLYRHEAFALHKRNKADDYLSTVGRDMVAEEASILFERQRAMGCSWAAPELQAEYLSILLRQRSFDEGPGGNSPYGGNQVEKMVGRCTFEPDEPRAAKAAYSFEYFSLLQKLNHIRLAENGETRPLTQPQRQQLLSLAHKTPDISLARIRKELALPETVQFNGVRCRANETLEESEKKEKFACLPAYHKMRKALDGVVKGRISSLSISQRDAAATALSLYKNEDTLRAKLTEAGFQAPEIDALAGLTGFSKFGHLSLKACRKLIPHLEQGLTYDQACTAAGYDFKGHGAGERAFTLPAAAPEMEQITSPVVRRAVAQTIKVVNGIIREMDASPAWVRIELARELSKTFGERQEMDRSMRENAAQNERLMQELRDTFHLLSPTGQDLVKYRLWKEQDGVCAYSLRRLDVERLFEPGYVDVDHIVPYSLSFDDRRSNKVLVLSSENRQKGNRLPLQYLQGKRREDFIVWTNSSVHDYRKRQNLLREKLSGDEAEGFRQRNLQDTQHMARFLYNYISDHLAFAQSEALGKKRVFAVSGAVTSHLRKRWGLSKVRADGDLHHALDAAVVACTTDGMIRRISGYYGHIEGEYLQDADGAGSQHARTKERFPAPWPRFRDELIVRLSEQPAEPLLDINPEFYCEYGTEHIRPVFVSRMPRRKVTGPGHKETIKGAAAADEGLLTVRKALTELKLDKDGEIKDYYMPSSDTLLYEALKAQLRRFGGDGKKAFAEPFYKPKADGTPGPLVRKVKTTEKATLTVPVHGGAASNDTMVRVDVFLVPGDGYYWVPVYTADTLKPELPNRAVVQGKPYSEWKEMREEDFIFSLYPNDLVYVEHKSGLKFTLQNADSTLEKTRTQTSAFAYFVSGSISTASITIRTHDNAYGIPSLGVKTLKTFHKYQVDVLGNVFPVHKETRQKFR

SEQ ID NO: 791 - protein, 951 aa, Sutterella parvirubra
MPTVRPVFHSSASFDLGAKNTGLFLVNHPAGAAPSAEYAAAYTIVQPADGDGLNYSTTNRRAVRHRLRGGKRFKLARRLVLQVIDALRKLKPGLIRDEEMRRTVEALSSLLKRRGFTRIESEAQVDPTTLDSVDPAVFADHETLGGFFSLGIPISTQWDALSQNPGAVEQLFKALPSAKDFGKYVTEQFPEFAEQKKLYADAIKVLSSEAKSIVMQLGLGHHHRSKYFEMIAHDMLRDPRLQGVFELFGSEERFKTFICNVSNLQLRALRWYFDEPNPEVANQWNPEKFQVVWLRGLKYFHPDAERKADMKKLIDELTASKDILDALCTTDPRRTIPPYEDQNNRRPPFDQTLWLSAAELTRRYGDKWRIWSQKFERADRALSTGLDEILLYTDRRSRMFNRNQDPSVYADSYVLQRVLDRSSKLDRYALRALAAGYRTQELHEPLATLSDTLGTQHVETFLTFAAEYYEEVAAAKNGLWLDGPSRLLERADIHPPMKKKVLDLLLGNILDATPEIGRILRTVLWNRHVHEKSRSTPASLCRSIEAIRKDFGGEFRMRYDALDAKIRAAEDQKKKFKPTNAEEKDLFKAWNATKTMHAFLRDVLQLTPKQLERTASPYVFAQLHTLIDTERDGFTSTSLAAHLENHWRMRANAAGMAQCSRLPADAVRPFDGVLSKALDRQAFEAAKLAAQHLMSRKELTDTDIRYSIIIESNRFAFSASTAELKKNTLAKKNAEKGLNFELKRWQDKDSRIREASRGICAYTGAKLGDVVEYDHIIPRAFTTSAMGSVFNSEANLICVSRPGNQTKADKRYGLNKLHKTYLTAVFGTADVTTIAASIEDIVGKLASANRLRHFELLNEKEQDAVRHALFLDDESDARRIVLRELAAQNKSRVNGTQAWFVRAFMTKLLEITKDWRERTGNTLDIRSWKTDAEVASRLRSALNFHAEITLT

SEQ ID NO: 792 - protein, 406 aa, Sutterella parvirubra
SNLFREEVPYGDHFLPIIQMKNRIYIGYQLPKADGTGGNAVAVLGKDPLELLETLKPFLDREPQAFSDHPVTYKMINERAYELLTKCALTPDQTTELERTQAEVLRSLNYQTSRAAVLGRLVDDKNKFVAKDAVWKEKDFVISFKLSPKKSAFKASGQLELPAKSDWKALVDSPELAINWGQPADDTFSQRIERKVRMNSSHLEHTPKKRVVSLPVVDKPSGGFRIRRHNLDGSAVFQVHTVANNKYGGFSADSAGKVDWSTPVLCGHLQHANLVPLDPETASAEQLVRMSEWRVVETTSDIRLEVCPGTSGRRYVRVELPFTLLQEWLTAGKVADVPVSPLHLPGSIKLTDPKTFCAEAQKTLSIFAQPRATIFFEQLGDRVRFRFEASGGPATMNAAYNAAGRS

SEQ ID NO: 793 - protein, 389 aa, Sutterella wadsworthensis
MKACDLEEKTNHLQACVAIDLGARYTGTFSILHKSSHLPSKDDCRAATYVLPEDGGKMTYSQRNRTAVRHRIRGKKRFALARRMAMLIIREKLAAKSVTLTSSETRRLAEAVGSLLRRRGYNRLETETDNDLTVLENIEPEVFSEHEILGKYFYAGTDLAIQWETLSQDLSKISSLLAERLSEKDFKKYLTGLIPDDKNKIKHIISVFKMLIDEAESINMQCVLGHKHRTQYLSDIHADMHRDTRLSKAAEAFGGVDRLWRLLGNLSNLQLRAHRWYFNAPHLFDDQALEPARLQKTLVRAFKYLHCPQGVESRAQAELVKELEEADDIIDALCTIDPVRTIPPYENQQNRRPPFDQTLYLSPDLGVSGFLCLGRLFQGQPNEAALCFL

SEQ ID NO: 794 - protein, 976 aa, Tannerella sp.
MKKILGLDLGSNSIGWALVNEAENRDEASSIIKLGVRVNPLTVDEMQNFEKGKSITTNADRTLKRSMRRNLQRYKLRRDALIKLLKKVGFITDGTILSEQGNRTTFETYRLRAKAPDEEISLQELARVLLMINKKRGYKSSRKIKEKEAGTLIDGMEVAKKLYDEDLTPGQLCLQLLESGKKSLPDFYSSDLQEEFDRIWNFQKQFNPKAFCDTAKEEIKGKNKSQTWAILAKYFIWMEEMDVWNEKESKTERVEKECKLVGLKRTVKKEEQRKENYCWRVQALTEQLDLEKVAVVLQEINGQISTSSGYLGAISDRSKVLYFNRQTVGQYQMAELEKNPNTSLRNMVFYRQDYLDEFDKIWEKQAEFHKELTVELKKEIRDIIIFYQRRLKSQKGLIGFCEFENREIMVEKNGKMQAKVVGCKVIPRSHPLFQEFKIWQTLNNVEVFAGEKKCKRKRTDAFPGLFDGTEDTLMVEGWRYLYQEEKEILAKELSVKKSLKKEYILKLLFDNPQDLDMNFEQIEGNDTGNVLFSAYSKMIEKYGYEPLDFGKPTDKIIEQLQVIFADLGWNTDLLFVDLNKEGKDLEKQPYFKLWHLLYSFEGDNTPTGNGKLVEKLMELCHVGKECALELVNISFQNDYGSLSAKAIKKILPYLKEGNRYDVACGYAGYRHSKSSLTKEEIENKVLKDKLDILPKNSLRNPVVEKILNQMVNVINAIIDTYGKPDEIRVELARELKKSAKEREELTKAIAKSTREHEEIRKVLQEEFGMINVSRNDIIRYKLYKELKDNGYKTLYSNQDIPKEKVFSKEIDIEHIIPQARLFDDSLSNKTLEYKAINIEKGNKTAYDFVKEKYGEKGLQQYLNRCESLFKGHRTKLRKLKMGQENIPEGFIDRDLRNTQYIAKKALAMLNEICRRVVATTGSITDRLREDWQLVDVLKELRCFRYFKDTKMKANHNKNIFYTSIKVDVSDTSKILK

SEQ ID NO: 795 - protein, 1049 aa, Tistrella mobilis
MINERLTFGIDLGIGSCGWAVLRHADAAGEPGVIEGLGSWCFDVPETSKERIPTNQVRRSNRLLRRVIRRRRNRMAEIRRLFHAQGLLPSADEDALKRPRLDPWELRARGLDQCLSAEEFAVALGHIARHRGFRSSAKRKAANTSGEDSKMLSALLVTRERTARYRTVGEMFARDPEYSARRRNRDGIFDRTVARDDLIHEVGKLFEAQRARGSAFASPDLEADFNAIAFRQAEMQDSERLVGNCPFERDEKRAARWAPSFERFRLLTRLINLRIATAEGERRFTPEDLARVSAELGATAKLPVSRVRALIGLLPDERFTTIRVEDEDRDIVARTGEAAPGTWRLRKTLGEALWAEMQARPDQLDAIAHVLSFFEATAKIRSELDRLGLPAAVIEALDRGLEDGAFAKFKGAGHISAKACRNLLPHLQQGHRYDQACRLAGYDHAASTLSHTAQVVSKAGFNALVTELGESIANPIARKALTEGLKQIRAMCARWGLPGAIHIELAREVGNSIEKRRELESQRETTTKRRQTERDEIRGLLALEDVDDDTLLRYRLWKEQGGKCLYTGKDIHVRQLIATDNSVQVDHILPWSRFGDDSFNNKTLCLASANQRKRGQTPWEWFSLTGTPEAWEVFASRVETSKDLRGFKKRNLLLKNADEVAQRFRSRNLNDTRYAARLLAEAAKLFYPAGDRQEKDGRRRVLTRPGPLTAALRHAWGLESLKKADGKRVSDDRHHALDALAVAAISEREVQRLTRSFQEWEQQGLARPLRHVAPPWPGFRGDVLAAYAQAFVARPERRRARGKGHDASIRQVVGEGPEAQVFERRGLADLKEADLDRVKDPERNQAIIEAVRAWILAGRPADAPPRSPRGDVIVKLRTAPAKKIKPAVPVRGGTADRGDMVRIDVFTRPNRKGRDEWYLVPIYPHQVMNRKAWPHPPMRSVVAYKDEAGWTEIGAEHSFRFSLYPRSYVQLVKSNGDVIEGYLVSMDRSTGAFRVFVHNNPAEMAKGIGAKTLLNLRKFNVDRFGVRTEVKSEVRTWHGEVCTSPVPPD

SEQ ID NO: 796 - protein, 1395 aa, Treponema denticola
MKKEIKDYFLGLDVGTGSVGWAVTDTDYKLLKANRKDLWGMRCFETAETAEVRRLHRGARRRIERRKKRIKLLQELFSQEIAKIDEGFFQRMKESPFYAEDKTILQENALFNDKDFTDKTYHKAYPTINHLIKAWIENKVKPDPRLLYLACHNIIKKRGHFLFEGDFDSENQFDTSIQALFEYLREDMEVDIDADSQKVKEILKDSSLKNSEKQSRLNKILGLKPSDKQKKAITNLISGNKINFADLYDNPDLKDAEKNSISFSKDDFDALSDDLASILGDSFELLLKAKAVYNCSVLSKVIGDEQYLSFAKVKIYEKHKTDLTKLKAVIKKHFPNNYKKVFGYNQDNESKNNYSGYVGVCKTKNKKLVINNSVNQEDFYKFLKPILSAKSEIKEVNDILAEIETGNFLPKQISKSNAEIPYQLRKMELEKILSNAEKHFSFLKQKDEKGLSHSEKIIMLLTFKIPYYIGPINDNHKKSFPDRCWVVKKEKSPSGKTTPWNFFDHIDKEKTAEEFITSRTNFCTYLIGESVLPKNSLLYSEYTVLNEINNLQIIIDGKNICDTKLKQKIYEDLFKKYKKITQKQISTFIKHEGICNKTDEVIILGIDKECTSSLKSYIELKNIFGKQVDEISTKNMLEEIIRWATIYDEGEGKTILKTKIKAEYGKYCSDEQIKKILNLKFSGWGRLSRKFLETVTSEMPGFSEPVNIITAMRETQNNLMELLSSEFKFTENIKKINSGFEDAEKQFSYDGLVKPLFLSPSVKKMLWQTLKLVKEISHITQAPPKKIFIEMAKGAELEPARTKTRLKILQDLYSSCKNDADAFSSEIQYLSGKIENEDNLRLRSDKLYLYYTQLGKCMYCGKPIEIGHVFDTSNYDIDHIYPQSKIKDDSISNRVLVCSSCNKNKEDKYPLKSEIQSKQRGFWNFLQRNNFISLEKLNRLTRTTPISDDETAKFIARQLVETRQATKVAAKVLEKMFPETKIVYSKAETVSMFRNKFDIIKCREINDFHHAHDAYLNIVVGNVYNTKFTNNPWNFIKEKRDNPKIADTYNYYKVFDYDVKRNNITAWEKGKTIITVKDMLKRNTPIYTRQAACKKGGLFDQTIMKKGLGQHPLKKEGPFSNISKYGGYNKVSAAYYTLIEYEEKGNKIRSLETIPLYLVKDIQKDQDVLKSYLTDLLGKKEFKILVPKIKINSLLKINGFPCHITGKTNDSFLLRPAVQFCCSNDEVLYFKKIIRFSEIRSQREKIGKTISPYEDLSFRSYIKENLCKKTKNDEIGEKEFYDLLQKKNLEIYDMLLTKHKDTIYKKRPNSATIDILVKGKEKFKSLIIENQFEVILEILKLFSATRNVSELQHIGGSKYSGVAKIGNKISSLDNCILIYQSITGIFEKRIDLLKV

SEQ ID NO: 797 - protein, 769 aa, Treponema denticola
MKKEIKDYFLGLDVGTGSVGWAVTDTDYKLLKANRKDLWGMRCFETAETAEVRRLHRGARRRIERRKKRIKLLQELFSQEIAKIDEGFFQRMKESPFYAEDKTILQENALFNDKDFTDKTYHKAYPTINHLIKAWIENKVKPDPRLLYLACHNIIKKRGHFLFEGDFDSENQFDTSIQALFEYLREDMEVDIDADSQKVKEILKDSSLKNSEKQSRLNKILGLKPSDKQKKAITNLISGNKINFADLYDNPDLKDAEKNSISFSKDDFDALSDDLASILGDSFELLLKAKAVYNCSVLSKVIGDEQYLSFAKVKIYEKHKTDLTKLKAVIKKHFPNNYKKVFGYNQDNESKNNYSGYVGVCKTKNKKLVINNSVNQEDFYKFLKPILSAKSEIKEVNDILAEIETGNFLPKQISKSNAEIPYQLRKMELEKILSNAEKHFSFLKQKDEKGLSHSEKIIMLLTFKIPYYIGPINDNHKKSFPDRCWVVKKEKSPSGKTTPWNFFDHIDKEKTAEEFITSRTNFCTYLIGESVLPKNSLLYSEYTVLNEINNLQIIIDGKNICDTKLKQKIYEDLFKKYKKITQKQISTFIKHEGICNKTDEVIILGIDKECTSSLKSYIELKNIFGKQVDEISTKNMLEEIIRWATIYDEGEGKTILKTKIKAEYGKYCSDEQIKKILNLKFSGWGRLSRKFLETVTSEMPGFSEPVNIITAMRETQNNLMELLSSEFKFTENIKKINSGFEDAEKQFSYDGLVKPLFLSPSVKKCCGRL

SEQ ID NO: 798 - protein, 1395 aa, Treponema denticola
MKKEIKDYFLGLDVGTGSVGWAVTDTDYKLLKANRKDLWGMRCFETAETAEVRRLHRGARRRIERRKKRIKLLQELFSQEIAKIDEGFFQRMKESPFYAEDKTILQENALFNDKDFTDKTYHKAYPTINHLIKAWIENKVKPDPRLLYLACHNIIKKRGHFLFEGDFDSENQFDTSIQALFEYLREDMEVDIDADSQKVKEILKDSSLKNSEKQSRLNKILGLKPSDKQKKAITNLISGNKINFADLYDNPDLKDAEKNSISFSKDDFDALSDDLASILGDSFELLLKAKAVYNCSVLSKVIGDEQYLSFAKVKIYEKHKTDLTKLKAVIKKHFPNNYKKVFGYNQDNESKNNYSGYVGVCKTKNKKLVINNSVNQEDFYKFLKPILSAKSEIKEVNDILAEIETGNFLPKQISKSNAEIPYQLRKMELEKILSNAEKHFSFLKQKDEKGLSHSEKIIMLLTFKIPYYIGPINDNHKKSFPDRCWVVKKEKSPSGKTTPWNFFDHIDKEKTAEEFITSRTNFCTYLIGESVLPKNSLLYSEYTVLNEINNLQIIIDGKNICDTKLKQKIYEDLFKKYKKITQKQISTFIKHEGICNKTDEVIILGIDKECTSSLKSYIELKNIFGKQVDEISTKNMLEEIIRWATIYDEGEGKTILKTKIKAEYGKYCSDEQIKKILNLKFSGWGRLSRKFLETVTSEMPGFSEPVNIITAMRETQNNLMELLSSEFKFTENIKKINSGFEDAEKQFSYDGLVKPLFLSPSVKKMLWQTLKLVKEISHITQAPPKKIFIEMAKGAELEPARTKTRLKILQDLYSSCKNDADAFSSEIQYLSGKIENEDNLRLRSDKLYLYYTQLGKCMYCGKPIEIGHVFDTSNYDIDHIYPQSKIKDDSISNRVLVCSSCNKNKEDKYPLKSEIQSKQRGFWNFLQRNNFISLEKLNRLTRTTPISDDETAKFIARQLVETRQATKVAAKVLEKMFPETKIVYSKAETVSMFRNKFDIIKCREINDFHHAHDAYLNIVVGNVYNTKFTNNPWNFIKEKRDNPKIADTYNYYKVFDYDVKRNNITAWEKGKTIITVKDMLKRNTPIYTRQAACKKGELFNQTIMKKGLGQHPLKKEGPFSNISKYGGYNKVSAAYYTLIEYEEKVNKIRSLETIPLYLVKDIQKDQDVLKSYLTDLLGKKEIKILVPKIKINSLLKINGFPCHITGKTGDSFVLRPAVQFCCSNDEVLYFKKIIRFNEIRSQREKMGKTISPYEDLSFRSYIKENLCKKTKADEIGEKEFYDLLQKKNLEIYDMLLTKHKDTIYNKRPNSTTLGMLTKGRYEFINLKPKDQIIVMLEILKLFCTTREAIDLGLIKGKPAAGVATLGKKISNLDNCILIYQSITGIFEKRIDLLKV

SEQ ID NO: 799 - protein, 1395 aa, Treponema denticola
MKKEIKDYFLGLDVGTGSVGWAVTDTDYKLLKANRKDLWGMRCFETAETAEVRRLHRGARRRIERRKKRIKLLQELFSQEIAKIDEGFFQRMKESPFYAEDKTILQENTLFNDKDFTDKTYHKAYPTINHLIKAWIENKVKPDPRLLYLACHNIIKKRGHFLFEGDFDSENQFDTSIQALFEYLREDMEVDIDADSQKVKEILKDSSLKNSEKQSRLNKILGLKPSDKQKKAITNLISGNKINFADLYDNPDLKDAEKNSISFSKDDFDALSDDLASILGDSFELLLKAKAVYNCSVLSKVIGDEQYLSFAKVKIYEKHKTDLTKLKNVIKKHFPKDYKKVFGYNKNEKNNNNYSGYVGVCKTKSKKLIINNSVNQEDFYKFLKTILSAKSEIKEVNDILTEIETGTFLPKQISKSNAEIPYQLRKMELEKILSNAEKHFSFLKQKDEKGLSHSEKIIMLLTFKIPYYIGPINDNHKKSFPDRCWVIKKEKSPSGKTTPWNFFDHIDKDKTAEAFITSRTNFCTYLVGESVLPKSSLLYSEYTVLNEINNLQIIIDGKNICDIKLKQKIYEELFKKYKKITQKQISTFIKHEGICNKTDEVIILGIDKECTSSLKSYIELKNIFGKQVDEISTKNMLEEIIRWATIYDEGEGKTILKTKIKAEYGKYCSDEQIKKILNLKFSGWGRLSRKFLETVTSEMPGFSEPVNIITAMRETQNNLMELLSSEFKFTENIKKINSGFEDAEKQFSYNGLVKPLFLSPSVKKMLWQTLKLVKEISHITQAPPKKIFIEMAKGAELEPARTKTRLKILQDLYNNCKNDADAFSSEIKDLSGKIENEDNLRLRSDKLYLYYTQLGKCMYCGKPIEIGHVFDTSNYDIDHIYPQSKIKDDSISNRVLVCSSCNKNKEDKYPLKSEIQSKQRGFWNFLQRNNFISLEKLNRLTRTTPISDDETAKFIARQLVETRQATKVAAKVLEKMFPETKIVYSKAETVSMFRNKFDIIKCREINDFHHAHDAYLNIVVGNVYNTKFTNNPWNFIKEKRDNPKIADTYNYYKVFDYDVKRNNITAWEKGKTIITVKDMLKRNTPIYTRQAACKKGGLFDQTIMKKGLGQHPLKKEGAFSNISKYGGYNKVSAAYYTLIEYEEKGNKIRSLETIPLYLVKDIQKDQDVLKSYLTDLLGKKEIKILVPKIKINSLLKINGFPCHITGKTGDSFVLRPAVQFCCSNDEVLYFKKIIRFNEIRSQREKMGKTISPYEDLSFRSYIKENLCKKTKADEIGEKEFYDLLQKKNLEIYDMLLTKHKDTIYNKRPNSTTLGMLTKGRYEFINLKPKDQIIVMLEILKLFCTTREAIDLGLIKGKPAAGVATLGKKISNPDNCILIYQSITGIFEKRIDLLKV

SEQ ID NO: 800 - protein, 1395 aa, Treponema denticola
MKKEIKDYFLGLDVGTGSVGWAVTDTDYKLLKANRKDLWGMRCFETAETAEVRRLHRGARRRIERRKKRIKLLQELFSQEIAKIDEGFFQRMKESPLYAEDKTILQENTLFNDKDFTDKTYHKAYPTINHLIKAWIENKVKPDPRLLYLACHNIIKKRGHFLFEGDFDSENQFDTSIQALFEYLREDMELDIDADSQKVKEILKDSSLKNSEKQSRLNKMLGLKPSDKQKKAITNLISGNKINFADLYDNPDLKDAEKNSISFSKDDFDALSDDLASILGDSFELLLKAKAVYNCSVLSKVIGDEQYLSFAKVKIYEKHKTDLTKLKNVIKKHFPKDYKKVFGYNKNEKNNNNYSAYVGVCKITHKKLVIKNSASQEDFYKFLKTILSAKSEIKEVNDILTEIETGTFLPKQISKSNAEIPYQLRKMELEKILSNAEKHFSFLKQKDEKGLSHSEKIIMLLTFKIPYYIGPINDNHKKSFPDRCWVVKKEKSPSGKTTPWNFFDHIDKEKTAEEFITSRTNFCTYLIGESVLPKSSLLYSEYTVLNEINNLQIIIDGKNICDIKLKQKIYEELFKKYKKITQKQISTFIKHEGICNKTDEVIILGIDKECTSSLKSYIELKNIFGKQVDEISTKNMLEEIIRWATIYDEGEGKTILKTKIKAEYGKYCSDEQIKKILNLKFSGWGRLSRKFLETVTSEMPGFSEPVNIITAMRETQNNLMELLSSEFKFTENIKKINSGFEDAEKQFSYNGLVKPLFLSPSVKKMLWQTLKLVKEISHITQAPPKKIFIEMAKGAELEPARTKTRLKILQDLYSSCKNDADAFSSEIQYLSGKIENEDNLRLRSDKLYLYYTQLGKCMYCGKPIEIGHVFDTSNYDIDHIYPQSKIKDDSISNRVLVCSSCNKNKEDKYPLKAEIQSKQRGFWNFLQRNNFISLEKLNRLTRTSPISDDETAKFIARQLVETRQATKVAAKVLEKMFPETKIVYSKAETVSMFRNKFDIIKCREINDFHHAHDAYLNIVVGNVYNTKFTNNPWNFIKEKRDNPKIADTYNYYKVFDYDVKRNNITAWEKGKTIITVKDMLKRNTPIYTRQAACKKGELFNQTIMKKGLGQHPLKKEGPLSNISKYGGYNKVSAAYYTLIEYEEKGSKIRSLETIPLYLVKDIQKNKDGLKSYLTDQIGKKEIKILIPKIKINSLLKINGFPCHITGKMGEAFVLRPAVQFCCSNDEALYFKKIIRFNEIRKQREKMGKTISPYEDLSFRSYIKDNLCKKTKADEIEEKEFYDLLQKKNLEIYDMLLTKHKDTIYKKRPNSATIDILVKGKEKFKSLIIENQFEVILEILKLFSATRNVSDLQHIGGSKNAGNARVGNKISSLDNCILIYQSITGIFEKRIDLLKI

SEQ ID NO: 801 - protein, 1395 aa, Treponema denticola
MKKEIKDYFLGLDVGTGSVGWAVTDTDYKLLKANRKDLWGMRCFETAETAEVRRLHRGARRRIERRKKRIKLLQELFSQEIAKIDEGFFQRMKESPLYAEDKTILQENTLFNDKDFTDKTYHKAYPTINHLIKAWIENKVKPDPRLLYLACHNIIKKRGHFLFEGDFDSENQFDTSIQALFEYLREDMEVDIDADSQKVKEILKDSSLKNSEKQSRLNKMLGLKPSDKQKKAITNLISGNKINFADLYDNPDLKDAEKNSISFSKDDFDALSDDLASILGDSFELLLKAKAVYNCSVLSKVIGDEQYLSFAKVKIYEKHKTDLTKLKNVIKKHFPKDYKKVFGYNKNEKNNNNYSGYVGVCKTKSKKLIINNSVNQEDFYKFLKTILSAKSEIKEVNDILTEIETGTFLPKQISKSNAEIPYQLRKMELEKILSNAEKHFSFLKQKDEKGLSHSEKIIMLLTFKIPYYIGPINDNHKKSFPDRCWVVKKEKSPSGKTTPWNFFDHIDKEKTAEEFITSRTNFCTYLIGESVLPKNSLLYSEYTVLNEINNLQIIIDGKNICDTKLKQKIYEELFKKYKKITQKQISTFIKHEGICNKTDEVIILGIDKECTSSLKSYIELKNIFGKQVDEISTKNMLEEIIRWATIYDEGEGKTILKTKIKAEYGKYCSDEQIKKILNLKFSGWGRLSRKFLETVTSEMPGFSEPVNIITAMRETQNNLMELLSSEFKFTENIKKINSGFEDVEKQFSYDGLVKPLFLSPSVKKMLWQTLKLVKEISHITQAPPKKIFIEMAKGAELDPVRTKTRLKILQDLYNNCKNDADAFSSEIKDLSGKIENEDNLRLRSDKLYLYYTQLGKCMYCGKPIEIGHVFDTSNYDIDHIYPQSKIKDDSISNRVLVCSSCNKNKEDKYPLKAEIQSKQRGFWNFLQRNNFISLEKFNRLTRATPISDDETAKFIARQLVETRQATKVAARVLEKMFPETKIVYSKAETVSMFRNKFDIVKCREINDFHHAHDAYLNIVVGNVYNTKFTNNLWNFIKEKRDNPKIADTYNYYKVFDYDVKRNNITAWEKGKTIITVKDMLKRNTPIYTRQAACKKGGLFDQTIMKKGLGQHPLKKEGPFSNISKYGGYNKVSAAYYTLIEYEEKGNKIRSLETIPLYLVKDIQKDQDVLKSYLTDLLGKKEFKILVPKIKINSLLKINGFPCHITGKTNDSFLLRPAVQFCCSNDEVLYFKKIIRFSEIRSQREKIGKTISPYEDLSFRSYIKENLCKKTKNDEIGEKEFYDLLQKKNLEIYDMLLTKHKDTIYKKRPNSATIDILVKGKEKFKSLIIENQFEVILEILKLFSATRNVSDLQHIGGSKYSGVAKIGNKISSLDNCILIYQSITGIFEKRIDLLKV

SEQ ID NO: 802 - protein, 357 aa, Treponema denticola
MKKEIKDYFLGLDVGTGSVGWAVTDTDYKLLKANRKDLWGMRCFETAETAEVRRLHRGARRRIERRKKRIKLLQELFSQEIAKTDEGFFQRMKESPFYAEDKTILQENALFNDRDFTDKTYHKAYPTINHLIKAWIENKVKPDPRLLYLACHNIIKKRGHFLFEGDFDSENQFDTSIQAFFEYLREDMEVDIDADSQKIKEILKDSSLKNSEKQSRLNKILGLKSSDKQKKAITNLISGNKINFADLYDNPDLKDAEKNSISFSKDDFDALSDDLASILGDSFELLLKAKAVYNCSVLSKVIGDEQYLSFAKVKIYEKHKTDLTKLKNVIKKHFPKDYKKVFGYNKNEKITTITPDM

SEQ ID NO: 803 - protein, 1395 aa, Treponema denticola
MKKEIKDYFLGLDVGTGSVGWAVTDTDYKLLKANRKDLWGMRCFETAETAEVRRLHRGARRRIERRKKRIKLLQELFSQEIAKTDEGFFQRMKESPFYAEDKTILQENALFNDRDFTDKTYHKAYPTINHLIKAWIENKVKPDPRLLYLACHNIIKKRGHFLFEGDFDSENQFDTSIQALFEYLREDMEVDIDADSQKVKEILKDSSLKNSEKQSRLNKMLGLKPSDKQKKAITNLISGNKINFADLYDNPDLKDAEKNSISFSKDDFDALSDDLASILGDSFELLLKAKAVYNCSVLSKVIGDEQYLSFAKVKIYEKHKTDLTKLKNVIKKHFPNDYKKVFGYNKNEKNNNNYSAYVGVCKTKSKKLVINNTVNQEDFYKFLKPILLAKSEIKEVNDILTEIETGTFLPKQISKSNAEIPYQLRKMELEKILSNAEKHFSFLKQKDEKGLSHSEKIIMLLTFKIPYYIGPINDNHKKSFPDRCWVIKKEKSPSGKTTPWNFFDHIDKDKTAEAFITSRTNFCTYLVGESVLPKNSLLYSEYTVLNEINNLQIIIDGKNICDIKLKQKIYEELFKKYKKITQKQISTFIKHEGICNKTDEVIILGIDKECTSSLKSYIELKNIFGKQVDEISTKNMLEEIIRWATIYDEGEGKTILKTKIKAEYGKYCSDEQIKKILNLKFSGWGRLSRKFLETVTSEMPGFSEPVNIITAMRETQNNLMELLSSEFKFTENIKKINSGFEDVEKQFSYDSLVKPLFLSPSVKKMLWQTLKLVKEISHITQAPPKKIFIEMAKGAELDPVRTKTRLKILQDLYNNCKNDADAFSSEIKDLSGKIENEDNLRLRSDKLYLYYTQLGKCMYCGKPIEIGHVFDTSNYDIDHIYPQSKIKDDSISNRVLVCSSCNKNKEDKYPLKAEIQSKQRGFWNFLQRNNFISLEKLNRLTRTSPISDDETAKFIARQLVETRQATKVAAKVLEKMFPETKIVYSKAETVSMFRNKFDIIKCREINDFHHAHDAYLNIVVGNVYNTKFTNNPWNFIKEKRDNPKIADTYNYYKVFDYDVKRNNITAWEKGKTIITVKDMLKRNTPIYTRQAACKKGELFNQTIMKKGLGQHPLKKEGPLSNISKYGGYNKVSAAYYTLIEYEEKGSKIRSLETIPLYLVKDIQKNKDGLKSYLTDQIGKKEIKILIPKIKINSLLKINGFPCHITGKMGEAFVLRPAVQFCCSNDEALYFKKIIRFNEIRKQREKMGKTISPYEDLSFRSYIKDNLCKKTKADEIEEKEFYDLLQKKNLEIYDMLLTKHKDTIYKKRPNSATIDILVKGKEKFKSLIIENQFEVILEILKLFSATRNVSDLQHIGGSKNAGNARVGNKISSLDNCILIYQSITGIFEKRIDLLKI

SEQ ID NO: 804 - protein, 631 aa, Treponema denticola
MLWQTLKLVKEISHITQAPPKKIFIEMAKGAELEPARTKTRLKILQDLYNNCKNDADAFSSEIKDLSGKIENEDNLRLRSDKLYLYYTQLGKCMYCGKPIEIGHVFDTSNYDIDHIYPQSKIKDDSISNRVLVCSSCNKNKEDKYPLRSEIQSKQRGFWNFLQRNNFISLEKLNRLTRTTPISDDETAKFIARQLVETRQATKVAAKVLEKMFPETKIVYSKAETVSMFRNKFDIVKCREINDFHHAHDAYLNIVVGNIYNTKFTNNPWNFIKEKRDNPKIADTYNYYKVFDYDVKRNNITAWEKGKTIITVKDMLKRNTPIYTRQAACKKGGLFDQTIMKKGLGQHPLKKEGPFSNISKYGGYNKVSAAYYTLIEYEEKENKIRSLETIPLYLVKDIQKSQEKLKSYLTDLLGKKEIKILVPKIKINSLLKINGFPCHITGKTNDSFLLRPAVQFCCSNDEVLYFKKIIRFNEIRSQREKMGKTISPYEDLSFRSYIKENLCKKTKNDEIGEKEFYDLLQKKNLEIYDMLLTKHKDTIYNKRPNSTTLGMLTKGRYEFINLKPKDQIIVMLEILKLFCTTREAIDLGLIKGKPAAGVATLGKKISNLDNCILIYQSITGIFEKRIDLLKV

SEQ ID NO: 805 - protein, 631 aa, Treponema denticola
MLWQTLKLVKEISHITQAPPKKIFIEMAKGAELEPARTKTRLKILQDLYSSCKNDADAFSSEIQYLSGKIENEDNLRLRSDKLYLYYTQLGKCMYCGKPIEIGHVFDTSNYDIDHIYPQSKIKDDSISNRVLVCSSCNKNKEDKYPLKSEIQSKQRGFWNFLQRNNFISLEKLNRLTRTTPISDDETAKFIARQLVETRQATKVAAKVLEKMFPETKIVYSKAETVSMFRNKFDIIKCREINDFHHAHDAYLNIVVGNVYNTKFTNNPWNFIKEKRDNPKIADTYNYYKVFDYDVKRNNITAWEKGKTIITVKDMLKRNTPIYTRQAACKKGELFNQTIMKKGLGQHPLKKEGPFSNISKYGGYNKVSAAYYTLIEYEEKVNKIRSLETIPLYLVKDIQKDQDVLKSYLTDLLGKKEIKILVPKIKINSLLKINGFPCHITGKTGDSFVLRPAVQFCCSNDEVLYFKKIIRFNEIRSQREKMGKTISPYEDLSFRSYIKENLCKKTKADEIGEKEFYDLLQKKNLEIYDMLLTKHKDTIYNKRPNSTTLGMLTKGRYEFINLKPKDQIIVMLEILKLFCTTREAIDLGLIKGKPAAGVATLGKKISNLDNCILIYQSITGIFEKRIDLLKV

SEQ ID NO: 806 - protein, 370 aa, Treponema denticola
MTEIETGTFLPKQISKSNAEIPYQLRKMELEKILSNAEKHFSFLKQKDEKGLSHSEKIIMLLTFKIPYYIGPINDNHKKSFPDRCWVVKKEKSPSGKTTPWNFFDHIDKEKTAEEFITSRTNFCTYLVGESVLPKSSLLYSEYTVLNEINNLQIIIDGKNICDIKLKQKIYEELFKKYKKITQKQISTFIKHEGICNKTDEVIILGIDKECTSSLKSYIELKNIFGKQVDEISTKNMLEDIIRWAAIYDEGEGKTILKTKIKAEYGKYCSDEQIKKILNLKFSGWGRLSRKFLETVTSEMPGFSEPVNIITAMRETQNNLMELLSSEFKFTENIKKINSGFEDVEKQFSYDGLVKPLFLSPSVKKCCGRL

SEQ ID NO: 807 - protein, 591 aa, Treponema phagedenis
MARGKEAEKGRTSSRYASIKALYENCKQDLADYDAVLEQFKSEEPLRLRSDKLYLYYTQLGRCMYTGRVIDIDRLMSDNSAYDIDHIYPRSKIKDDSLTNRVLVVKDANQDKRDEPLSPQIQDKQKGFWDFLKHNNFISIEKYERLTYRGYFTEEMLSGFIARQLVETRQGTKTAGQILEQLYPDSTVVYCKAANTSEFRQKFNLIKCREINDLHHAHDAYLNIAVGNVYYTKFTSNPRNFMKLKEPYNLRELFDRDVERNNTIAWVKNKTITTIKDMLKRNTPLYTRYAYCKTGGFFDQNIMKKGKGQFPLKENSPLSDISKYGGYNKVSGAYFILVQKKEKDAVVRILETVPLYLLNKPGKESENVREYLSTALGTKDFKILIPKIKINSLFKINGFLVHITGKTNDRFLVRSAVQFFCDDNLTLFFKRIIAFNGLRNLNKDKSMTAYDDNTMRVYVRGNLFKDKNQLFDKNKFNEIVKGKNISVYKDMVKRYETSIYKFRPNTAVIPILKSGEDKFINLPIEEQFKILQEILKLFGAINGTANLTLIGGRPSTGEMKISNNISNLKQCILIHQSPTGVFEQQIDLLKI

SEQ ID NO: 808 - protein, 1062 aa, Treponema sp.
MIMKLEKWRLGLDLGTNSIGWSVFSLDKDNSVQDLIDMGVRIFSDGRDPKTKEPLAVARRTARSQRKLIYRRKLRRKQVFKFLQEQGLFPKTKEECMTLKSLNPYELRIKALDEKLEPYELGRALFNLAVRRGFKSNRKDGSREEVSEKKSPDEIKTQADMQTHLEKAIKENGCRTITEFLYKNQGENGGIRFAPGRMTYYPTRKMYEEEFNLIRSKQEKYYPQVDWDDIYKAIFYQRPLKPQQRGYCIYENDKERTFKAMPCSQKLRILQDIGNLAYYEGGSKKRVELNDNQDKVLYELLNSKDKVTFDQMRKALCLADSNSFNLEENRDFLIGNPTAVKMRSKNRFGKLWDEIPLEEQDLIIETIITADEDDAVYEVIKKYDLTQEQRDFIVKNTILQSGTSMLCKEVSEKLVKRLEEIADLKYHEAVESLGYKFADQTVEKYDLLPYYGKVLPGSTMEIDLSAPETNPEKHYGKISNPTVHVALNQTRVVVNALIKEYGKPSQIAIELSRDLKNNVEKKAEIARKQNQRAKENIAINDTISALYHTAFPGKSFYPNRNDRMKYRLWSELGLGNKCIYCGKGISGAELFTKEIEIEHILPFSRTLLDAESNLTVAHSSCNAFKAERSPFEAFGTNPSGYSWQEIIQRANQLKNTSKKNKFSPNAMDSFEKDSSFIARQLSDNQYIAKAALRYLKCLVENPSDVWTTNGSMTKLLRDKWEMDSILCRKFTEKEVALLGLKPEQIGNYKKNRFDHRHHAIDAVVIGLTDRSMVQKLATKNSHKGNRIEIPEFPILRSDLIEKVKNIVVSFKPDHGAEGKLSKETLLGKIKLHGKETFVCRENIVSLSEKNLDDIVDEKIKSKVKDYVAKHKGQKIEAVLSDFSKENGIKKVRCVNRVQTPIEITSGKISRYLSPEDYFAAVIWEIPGEKKTFKAQYIRRNEVEKNSKGLNVVKPAVLENGKPHPAAKQVCLLHKDDYLEFSDKGKMYFCRIAGYAATNNKLDIRPVYAVSYCADWINSTNETMLTGYWKPTPTQNWVSVNVLFDKQKARLVTVSPIGRVFRK

SEQ ID NO: 809 - protein, 281 aa, Treponema vincentii
MKTLGLDIGTNSIGWGIVDETANKIEDCGVYIFPEGVKKEKGNESSKAAERTSFRLARRLKFRRKLRKCETLKVLIKNKMCPLTMEELEKWRKQKIYPVSQDFLNWYRTDELKNWEPYFLRKKCAEQKAGPYEIGRALYHLAQRRGFLSNRKESTKASDGKVSKSIDELSSLMDGRTLGQYFYELKQSGEKVRGKYTSRKEHYEKEFNKICEVQEISPELKDDLYRAIFFQRKLKSQKFLVGKCTFERNKPRAPISHFEFEEFRMLSFINSIKIAKKLRRR

SEQ ID NO: 810 - protein, 675 aa, uncultured bacterium
MTAENYSNVRFAFDIGTNSIGWAVFQLNDKQEATSILNAGARIFSDGRDPKTFEPLAVRRRNVRSASRMRDRYLRRRKRTLDKLIGYGLLPEDKAERDKILLETNDKPSGSTDKKTDPYSLRARALEEKLPLAYVARALFHIGQRRGFKSNRKADRKSNEKGKIAAGIEELSGLMHQSHAPTLGAYLAKRREEGHVVRLRASSEALTNKAYAFYPERAMLEDEFHKIWQAQAEYYPDVLTKEREEELFHVMFFQRPLKEQKVGLCTLVEGELRLPKSDPLFQQFRLYKEINELAIILPDLSQRKLTMEERDTLITLMRPAKTKTFAALRKALKIPAGGRFNKETENRKQLTGDEVYSVFSKPELFGGDWAKFSIEQQREIIDQLNNEENPDKLEEWLKNKFPKLSDEQRSEIINANLPDGYGRFGITATSKILEQLKKDVISEAEAAHRCGFDHSLANRNWKGLDELPRYQEVLERHIVPGTGDKNDIYDIYKGRLTNPTVHIGLNQVRRLTNRLIKAYGKPWQIVVELARDLPMSSEERKEHNKTLNDNIKAGFERTQKLERLGQKDNANNRLLLKLWEELGKDPDDRKSIYSGTRITEPMLFSGEVEIDHILPFSLTYDDSYANKILCLREENRIKRNRAPADVTEWKDRYDEIIGRSKNCQRTNKNVLGPMQ

SEQ ID NO: 811 - protein, 1017 aa, uncultured bacterium]
MRVDSLGRCLSDEEWARVIYHLCKHRGFHWISRAEAKQTEGDSKSEGGKVKQGLAGTAKLMDEKGYRSAAEMVLAEFPEAQRNKQGEYRKALSRELLAKELALLFARQRVFGNRHATDTLETAILGNSDKKSGLFWQQKPALAGADLLKMLGTCTFEKNEYRAPKASFTAERHVWLTRLNNLRIVTDGITRQLTEQERQLVLPLPYRQAGDLTYKQLGMALTKAGLLEAGCFKFIGLAYPTEAQKAEGKTKDPESATLVKIPAWQELRQTLNKASLNDEWEKLSGDALCGQPEIFDKIAWILSVYKDDDEVRTELAKLVLPNPEGLTEALLNIRFDKFHALSLKALRAIVPHMEKGLRYDEACVQAGYHHSQLHKIGEGEHKYLPPLYDGRDGDGRMIFAEDADIPRNPVVLRSLNQARKVVNAIIRRYGSPSAVHIEMARDLSRPFDERNKIKKDQDEYQARNQRDREQFIELFGHPPKGLEFEKWRLYREQNGQCAYSQKPLASSGDVAEIFLDGSTEIDHALPYSRSFDDSKNNKVLVLTRENRDKGNRTPYEYLGGAENSERWQRFFSFVESNKAYRLAKRTRLLRKDFGAKESEEFRERNLNDTRYVCRFFKNYVEQHLKLAEGSEAKRCVVVSGQLTNFLRTRWGLLKIRSDSDRHHALDAAVVAACSHSMVQRLSNYSRTRELEQVRDGFVNIETGEIVNPAMHQQLREHFPDPWPYFRHELEARLKIDSPALLREEMARLSSYTEEELAALKPLFVSRAPQRRNGGAAHKDTIYGQPEKLKKNGSVSQKVALASLALKDIDLLADPHRNAKLYGAIRERLEAHGGKGDKAFPATNPLRKPDKEGNPTGPIVRTVTKVIDKLSGIPVRGGIAKNDTMLRVDVFTKAGRFHLVPVYVHHRVTGLPNQAITRGKDENQWAIIDDTFEWRFSLYPNDLVQIRLKDETHLGYYASTDRSTSSISIWAHDRNQSVGKDGLIRSIGVTTAKDIEKFHVDTLGNVYPAPPEKRRGLA

SEQ ID NO: 812 - protein, 600 aa, uncultured bacterium]
VNAIIKKHGSLSAVHIEMARDLSRPLDERREVKKLQEEFKDRNDKARESFEADHGYRPKGIVFEKWMLYREQHGKCAYSMEGLDIDRVLNDANYAQIDHALPYSRSYDDSKNNKVLVLTRENQNKGNRTAYEYLTSFAGGEDGDRWRNYAAWVNSNKSYRMAKRNRLLRKNYGPDEASGFKDRNLNDTRYICKFFKNYVEEHLQLAPRADGNANKRCVVVNGQLTAFLRARWGLSKVRSESDRHHALDAAVVAACSHGMVKALADYARNKEVAYLREGFPDPETGEIINPEAHARGVHHFPEPWAHFRHELQVRLYSDDLQALREDLQRLGTYSEQDLLGVRTLFVSRAPQRRNDGAVHKETIYAQPEALRKQGGVVQKVPLTSLSLKDLDNLADPHRNAKLYTALRARLEAHGGKADKAFGPDQPFYKPDKNGNPTGPIVRTIKLVIDKLSGIPIRGGVAKNDTMLRVDVFTKAGKFHLVPVYVHHRVTGLPDRAIVAFKDEVEWTQVDDSFKFLFSIHPNDLIRIGLKAKEPMIGYFASCHRGTGAFNVWSHDRNTSVGKSGSVEGIGIKTALSLEKLNIDVLGNVYPARPEQRHGLA

SEQ ID NO: 813 - protein, 1011 aa, uncultured delta
MSSKAIDSLEQLDLFKPQEYTLGLDLGIKSIGWAILSGERIANAGVYLFETAEELNSTGNKLISKAAERGRKRRIRRMLDRKARRGRHIRYLLEREGLPTDELEEVVVHQSNRTLWDVRAEAVERKLTKQELAAVLFHLVRHRGYFPNTKKLPPDDESDSADEEQGKINRATSRLREELKASDCKTIGQFLAQNRDRQRNREGDYSNLMARKLVFEEALQILAFQRKQGHELSKDFEKTYLDVLMGQRSGRSPKLGNCSLIPSELRAPSSAPSTEWFKFLQNLGNLQISNAYREEWSIDAPRRAQIIDACSQRSTSSYWQIRRDFQIPDEYRFNLVNYERRDPDVDLQEYLQQQERKTLANFRNWKQLEKIIGTGHPIQTLDEAARLITLIKDDEKLSDQLADLLPEASDKAITQLCELDFTTAAKISLEAMYRILPHMNQGMGFFDACQQESLPEIGVPPAGDRVPPFDEMYNPVVNRVLSQSRKLINAVIDEYGMPAKIRVELARDLGKGRELRERIKLDQLDKSKQNDQRAEDFRAEFQQAPRGDQSLRYRLWKEQNCTCPYSGRMIPVNSVLSEDTQIDHILPISQSFDNSLSNKVLCFTEENAQKSNRTPFEYLDAADFQRLEAISGNWPEAKRNKLLHKSFGKVAEEWKSRALNDTRYLTSALADHLRHHLPDSKIQTVNGRITGYLRKQWGLEKDRDKHTHHAVDAIVVACTTPAIVQQVTLYHQDIRRYKKLGEKRPTPWPETFRQDVLDVEEEIFITRQPKKVSGGIQTKDTLRKHRSKPDRQRVALTKVKLADLERLVEKDASNRNLYEHLKQCLEESGDQPTKAFKAPFYMPSGPEAKQRPILSKVTLLREKPEPPKQLTELSGGRRYDSMAQGRLDIYRYKPGGKRKDEYRVVLQRMIDLMRGEENVHVFQKGVPYDQGPEIEQNYTFLFSLYFDDLVEFQRSADSEVIRGYYRTFNIANGQLKISTYLEGRQDFDFFGANRLAHFAKVQVNLLGKVIK

SEQ ID NO: 814 - protein, 1011 aa, uncultured delta proteobacterium HF0070_07E19; identical to SEQ ID NO: 813

SEQ ID NO: 815 - protein, 1120 aa, Veillonella sp.
MGFKANLVNLFTDEDIEVILPEEKEFKSINLHEGIYEDVRDAYEDAWGDRFAIVDQCKVLHDIIVISSIIKPGQSLSEAKIESYNQHKEDLVLLKSVLKEDRKLYDDMFVVDTDKGTNYVKYTKQGVNGNTSATQEEFYKYVRKVVSVLPETEHTRRIVQKLEEGTFLPLQRISKNGVVPYQLHKEELVRILDKATVNFPFLNKVENGLTVADKIISILEFKIPYYVGPLNPTHSIENGGFAWVVRKEAGQVLPWNFEQKVDVQASAVKFIENLTNKCTYLIDQDVLPKYSLLYAEFSLLNELNNIRVNDKPLPADVKQAFIRDHFISLQDSKTATKKVVAKYLVDNNYVSQPPIITGMDQQIATKLTSHRDMTRILGEHFDHAMAEDIIRYITIFGESKDMLRQVLKNYYGDRLTTEQIKKLGKLTYTGWGRLSKKFLSDIWGMKKNDDDAEAGTIIEHMREGQENLMQLLSSSYSFIDVVQEYVTNVLGEKEKTAFEMLEDLSLSPMVKRSVWQTLRILDEIVSIRKELPKKIFVEVARTNKADKKRTQSRKALLEELYKQIKDEDVHVLQQELESKEDSALNSKKLYLYFTQMGRCMYSGRRIDIHELFTDKYDIDHIYPRSLTKDDSWHNIVLVEKQLNAEKTDRFPILSAIQSKQKGFWKLLWDRGFISEKKYDRLVRTTDLTDEELNQFINRQMVSTNQSVKAVTTLLHQLYPETEVVFSKAENVSDFRHDYDFVKVRSINHHHHAKDAYLNIVVGNVYHEKFTKNFLSFAKQKGTRRTYNLTKIFEYEIKLTEESKKVIWDPNIHMDIVKKMMKSNDVRVTQRAVPQKGGLSDETIYKKGIAKRGVYLPLKSSDERVRDVEKYGGRTSITISEYIILNIRDTSDQDRIEIFSLPLYIAGKKDIHKAIEEAYLSTCKKPASVVDIQILYRGLYIGSKVNINGFTYYMGGKTGSNVSIDSAVDVVMDITSSVYIKLLEKVAIKKIENPKTFRIENIKTSYNHKEVTVSKEQNIALYQELLKKLDTPLFSKMKGNKLEEFRTVGFDTFIALSLEEQASVLLEVLNVLTNFKTKRDITKIGMTSSRSTLGINISNTEQFSVITTSITGLYEQEIKIK

SEQ ID NO: 816 - protein, 983 aa, Verminephrobacter aporrectodeae
MRRRRDRLLKRKARMHDQLMRHGFFPADAAGRKVLERLNPYQLRAKGLHQALTPGEFARALFHINQRRGFQSNRKTDRKDNESGALKQAISELRAQIHDSGCATVGEWFWKERMQQKPEGVHRQGVRARYRETPYTTDEGRQRIDKRYDLYVDRAMIEQEFDALWAVQAALQPGLFTDAACKELRYTLLFQRKLRPVKPGRCTLLPEEERAPLALPSTQRFRILQEVNHLRLLDEALREVPLTLAQRDALVAALESQGKLGFAPMRKLLKLPGTVKFNLEDEKRTELKGNATSAILARKDLFGPAWAGFDAALQDEIVWQLVSEEGEGRLIAWLQQHTGVDEARAEAIADTSLPEGYGSLSRKALERIVPALQREVCSYDKAVQAAGFAHHSDLGFDFEHSGDEVQQVGERIIASTGEVRPLFAFKQLPYYGKALQRHVAFGSGKPEDPEEKRHGKIANPTVHIGLNQVRTVVNALIRRYGRPSEVVVELARDLKQSREQQQETQRKQAENQRRNTRIRERIAETLGISPERVRSSDIQKWILWEELSFDVVDRRCPYSGEQISTTMLLSPKVEIEHILPFSQTLDDSLNNRTVALREANRIKRNRTPWDARADFEARGWSYEGILHRAERMPLRKRYRFAPDGYQRWLGEDKDFLARALNDTRYLSRVAANYLRLVCPKPQGVRVIPGRMTAMLRAKFGLNDVLGLDGEKNRNDHRHHAVDACVIGVTDQGLMQRFARASAQAREDGLTRLVQDMPLPWPSYRDHVERAVRHIWVSHKPDHGFEGAMMEETAYGIRKDGSIKPRRKADGSAGREVVNLIRITESRQPVRHGVDSQGQPLPYKGYVGGSNYCIEITANDQGKWEGAVISTFEAYRIVRASGWGRLRHCSHGQNGRPLMMRLMIGDAVRLALDGSEKTMRVVKISANGQVFLVAPNEANVDARNRDKADPFAYVSKKAGSFQSAKARQVSISPIGELRDPGFKG

SEQ ID NO: 817 - protein, 4 aa, Artificial sequence
  Synthetic Sequence
AAAA

SEQ ID NO: 818 - protein, 1300 aa, Francisella tularensis
MSIYQEFVNKYSLSKTLRFELIPQGKTLENIKARGLILDDEKRAKDYKKAKQIIDKYHQFFIEEILSSVCISEDLLQNYSDVYFKLKKSDDDNLQKDFKSAKDTIKKQISEYIKDSEKFKNLFNQNLIDAKKGQESDLILWLKQSKDNGIELFKANSDITDIDEALEIIKSFKGWTTYFKGFHENRKNVYSSNDIPTSIIYRIVDDNLPKFLENKAKYESLKDKAPEAINYEQIKKDLAEELTFDIDYKTSEVNQRVFSLDEVFEIANFNNYLNQSGITKFNTIIGGKFVNGENTKRKGINEYINLYSQQINDKTLKKYKMSVLFKQILSDTESKSFVIDKLEDDSDVVTTMQSFYEQIAAFKTVEEKSIKETLSLLFDDLKAQKLDLSKIYFKNDKSLTDLSQQVFDDYSVIGTAVLEYITQQIAPKNLDNPSKKEQELIAKKTEKAKYLSLETIKLALEEFNKHRDIDKQCRFEEILANFAAIPMIFDEIAQNKDNLAQISIKYQNQGKKDLLQASAEDDVKAIKDLLDQTNNLLHKLKIFHISQSEDKANILDKDEHFYLVFEECYFELANIVPLYNKIRNYITQKPYSDEKFKLNFENSTLANGWDKNKEPDNTAILFIKDDKYYLGVMNKKNNKIFDDKAIKENKGEGYKKIVYKLLPGANKMLPKVFFSAKSIKFYNPSEDILRIRNHSTHTKNGSPQKGYEKFEFNIEDCRKFIDFYKQSISKHPEWKDFGFRFSDTQRYNSIDEFYREVENQGYKLTFENISESYIDSVVNQGKLYLFQIYNKDFSAYSKGRPNLHTLYWKALFDERNLQDVVYKLNGEAELFYRKQSIPKKITHPAKEAIANKNKDNPKKESVFEYDLIKDKRFTEDKFFFHCPITINFKSSGANKFNDEINLLLKEKANDVHILSIDRGERHLAYYTLVDGKGNIIKQDTFNIIGNDRMKTNYHDKLAAIEKDRDSARKDWKKINNIKEMKEGYLSQVVHEIAKLVIEYNAIVVFEDLNFGFKRGRFKVEKQVYQKLEKMLIEKLNYLVFKDNEFDKTGGVLRAYQLTAPFETFKKMGKQTGIIYYVPAGFTSKICPVTGFVNQLYPKYESVSKSQEFFSKFDKICYNLDKGYFEFSFDYKNFGDKAAKGKWTIASFGSRLINFRNSDKNHNWDTREVYPTKELEKLLKDYSIEYGHGECIKAAICGESDKKFFAKLTSVLNTILQMRNSKTGTELDYLISPVADVNGNFFDSRQAPKNMPQDADANGAYHIGLKGLMLLGRIKNNQEGKKLNLVIKNEEYFEFVQNRNN

SEQ ID NO: 819 - protein, 1307 aa, unknown
  Synthetic Sequence
MTQFEGFTNLYQVSKTLRFELIPQGKTLKHIQEQGFIEEDKARNDHYKELKPIIDRIYKTYADQCLQLVQLDWENLSAAIDSYRKEKTEETRNALIEEQATYRNAIHDYFIGRTDNLTDAINKRHAEIYKGLFKAELFNGKVLKQLGTVTTTEHENALLRSFDKFTTYFSGFYENRKNVFSAEDISTAIPHRIVQDNFPKFKENCHIFTRLITAVPSLREHFENVKKAIGIFVSTSIEEVFSFPFYNQLLTQTQIDLYNQLLGGISREAGTEKIKGLNEVLNLAIQKNDETAHIIASLPHRFIPLFKQILSDRNTLSFILEEFKSDEEVIQSFCKYKTLLRNENVLETAEALFNELNSIDLTHIFISHKKLETISSALCDHWDTLRNALYERRISELTGKITKSAKEKVQRSLKHEDINLQEIISAAGKELSEAFKQKTSEILSHAHAALDQPLPTTLKKQEEKEILKSQLDSLLGLYHLLDWFAVDESNEVDPEFSARLTGIKLEMEPSLSFYNKARNYATKKPYSVEKFKLNFQMPTLASGWDVNKEKNNGAILFVKNGLYYLGIMPKQKGRYKALSFEPTEKTSEGFDKMYYDYFPDAAKMIPKCSTQLKAVTAHFQTHTTPILLSNNFIEPLEITKEIYDLNNPEKEPKKFQTAYAKKTGDQKGYREALCKWIDFTRDFLSKYTKTTSIDLSSLRPSSQYKDLGEYYAELNPLLYHISFQRIAEKEIMDAVETGKLYLFQIYNKDFAKGHHGKPNLHTLYWTGLFSPENLAKTSIKLNGQAELFYRPKSRMKRMAHRLGEKMLNKKLKDQKTPIPDTLYQELYDYVNHRLSHDLSDEARALLPNVITKEVSHEIIKDRRFTSDKFFFHVPITLNYQAANSPSKFNQRVNAYLKEHPETPIIGIDRGERNLIYITVIDSTGKILEQRSLNTIQQFDYQKKLDNREKERVAARQAWSVVGTIKDLKQGYLSQVIHEIVDLMIHYQAVVVLENLNFGFKSKRTGIAEKAVYQQFEKMLIDKLNCLVLKDYPAEKVGGVLNPYQLTDQFTSFAKMGTQSGFLFYVPAPYTSKIDPLTGFVDPFVWKTIKNHESRKHFLEGFDFLHYDVKTGDFILHFKMNRNLSFQRGLPGFMPAWDIVFEKNETQFDAKGTPFIAGKRIVPVIENHRFTGRYRDLYPANELIALLEEKGIVFRDGSNILPKLLENDDSHAIDTMVALIRSVLQMRNSNAATGEDYINSPVRDLNGVCFDSRFQNPEWPMDADANGAYHIALKGQLLLNHLKESKDLKLQNGISNQDWLAYIQELRN

SEQ ID NO: 820 - protein, 1246 aa, unknown
  Synthetic Sequence
MLKNVGIDRLDVEKGRKNMSKLEKFTNCYSLSKTLRFKAIPVGKTQENIDNKRLLVEDEKRAEDYKGVKKLLDRYYLSFINDVLHSIKLKNLNNYISLFRKKTRTEKENKELENLEINLRKEIAKAFKGNEGYKSLFKKDIIETILPEFLDDKDEIALVNSFNGFTTAFTGFFDNRENMFSEEAKSTSIAFRCINENLTRYISNMDIFEKVDAIFDKHEVQEIKEKILNSDYDVEDFFEGEFFNFVLTQEGIDVYNAIIGGFVTESGEKIKGLNEYINLYNQKTKQKLPKFKPLYKQVLSDRESLSFYGEGYTSDEEVLEVFRNTLNKNSEIFSSIKKLEKLFKNFDEYSSAGIFVKNGPAISTISKDIFGEWNVIRDKWNAEYDDIHLKKKAVVTEKYEDDRRKSFKKIGSFSLEQLQEYADADLSVVEKLKEIIIQKVDEIYKVYGSSEKLFDADFVLEKSLKKNDAVVAIMKDLLDSVKSFENYIKAFFGEGKETNRDESFYGDFVLAYDILLKVDHIYDAIRNYVTQKPYSKDKFKLYFQNPQFMGGWDKDKETDYRATILRYGSKYYLAIMDKKYAKCLQKIDKDDVNGNYEKINYKLLPGPNKMLPKVFFSKKWMAYYNPSEDIQKIYKNGTFKKGDMFNLNDCHKLIDFFKDSISRYPKWSNAYDFNFSETEKYKDIAGFYREVEEQGYKVSFESASKKEVDKLVEEGKLYMFQIYNKDFSDKSHGTPNLHTMYFKLLFDENNHGQIRLSGGAELFMRRASLKKEELVVHPANSPIANKNPDNPKKTTTLSYDVYKDKRFSEDQYELHIPIAINKCPKNIFKINTEVRVLLKHDDNPYVIGIDRGERNLLYIVVVDGKGNIVEQYSLNEIINNFNGIRIKTDYHSLLDKKEKERFEARQNWTSIENIKELKAGYISQVVHKICELVEKYDAVIALEDLNSGFKNSRVKVEKQVYQKFEKMLIDKLNYMVDKKSNPCATGGALKGYQITNKFESFKSMSTQNGFIFYIPAWLTSKIDPSTGFVNLLKTKYTSIADSKKFISSFDRIMYVPEEDLFEFALDYKNFSRTDADYIKKWKLYSYGNRIRIFRNPKKNNVFDWEEVCLTSAYKELFNKYGINYQQGDIRALLCEQSDKAFYSSFMALMSLMLQMRNSITGRTDVDFLISPVKNSDGIFYDSRNYEAQENAILPKNADANGAYNIARKVLWAIGQFKKAEDEKLDKVKIAISNKEWLEYAQTSVKH

SEQ ID NO: 821 - protein, 1246 aa, Porphyromonas macacae
MKTQHFFEDFTSLYSLSKTIRFELKPIGKTLENIKKNGLIRRDEQRLDDYEKLKKVIDEYHEDFIANILSSFSFSEEILQSYIQNLSESEARAKIEKTMRDTLAKAFSEDERYKSIFKKELVKKDIPVWCPAYKSLCKKFDNFTTSLVPFHENRKNLYTSNEITASIPYRIVHVNLPKFIQNIEALCELQKKMGADLYLEMMENLRNVWPSFVKTPDDLCNLKTYNHLMVQSSISEYNRFVGGYSTEDGTKHQGINEWINIYRQRNKEMRLPGLVFLHKQILAKVDSSSFISDTLENDDQVFCVLRQFRKLFWNTVSSKEDDAASLKDLFCGLSGYDPEAIYVSDAHLATISKNIFDRWNYISDAIRRKTEVLMPRKKESVERYAEKISKQIKKRQSYSLAELDDLLAHYSEESLPAGFSLLSYFTSLGGQKYLVSDGEVILYEEGSNIWDEVLIAFRDLQVILDKDFTEKKLGKDEEAVSVIKKALDSALRLRKFFDLLSGTGAEIRRDSSFYALYTDRMDKLKGLLKMYDKVRNYLTKKPYSIEKFKLHFDNPSLLSGWDKNKELNNLSVIFRQNGYYYLGIMTPKGKNLFKTLPKLGAEEMFYEKMEYKQIAEPMLMLPKVFFPKKTKPAFAPDQSVVDIYNKKTFKTGQKGFNKKDLYRLIDFYKEALTVHEWKLFNFSFSPTEQYRNIGEFFDEVREQAYKVSMVNVPASYIDEAVENGKLYLFQIYNKDFSPYSKGIPNLHTLYWKALFSEQNQSRVYKLCGGGELFYRKASLHMQDTTVHPKGISIHKKNLNKKGETSLFNYDLVKDKRFTEDKFFFHVPISINYKNKKITNVNQMVRDYIAQNDDLQIIGIDRGERNLLYISRIDTRGNLLEQFSLNVIESDKGDLRTDYQKILGDREQERLRRRQEWKSIESIKDLKDGYMSQVVHKICNMVVEHKAIVVLENLNLSFMKGRKKVEKSVYEKFERMLVDKLNYLVVDKKNLSNEPGGLYAAYQLTNPLFSFEELHRYPQSGILFFVDPWNTSLTDPSTGFVNLLGRINYTNVGDARKFFDRFNAIRYDGKGNILFDLDLSRFDVRVETQRKLWTLTTFGSRIAKSKKSGKWMVERIENLSLCFLELFEQFNIGYRVEKDLKKAILSQDRKEFYVRLIYLFNLMMQIRNSDGEEDYILSPALNEKNLQFDSRLIEAKDLPVDADANGAYNVARKGLMVVQRIKRGDHESIHRIGRAQWLRYVQEGIVE

SEQ ID NO: 822 - protein, 1326 aa, Prevotella disiens
MKVMENYQEFTNLFQLNKTLRFELKPIGKTCELLEEGKIFASGSFLEKDKVRADNVSYVKKEIDKKHKIFIEETLSSFSISNDLLKQYFDCYNELKAFKKDCKSDEEEVKKTALRNKCTSIQRAMREAISQAFLKSPQKKLLAIKNLIENVFKADENVQHFSEFTSYFSGFETNRENFYSDEEKSTSIAYRLVHDNLPIFIKNIYIFEKLKEQFDAKTLSEIFENYKLYVAGSSLDEVFSLEYFNNTLTQKGIDNYNAVIGKIVKEDKQEIQGLNEHINLYNQKHKDRRLPFFISLKKQILSDREALSWLPDMFKNDSEVIKALKGFYIEDGFENNVLTPLATLLSSLDKYNLNGIFIRNNEALSSLSQNVYRNFSIDEAIDANAELQTFNNYELIANALRAKIKKETKQGRKSFEKYEEYIDKKVKAIDSLSIQEINELVENYVSEFNSNSGNMPRKVEDYFSLMRKGDFGSNDLIENIKTKLSAAEKLLGTKYQETAKDIFKKDENSKLIKELLDATKQFQHFIKPLLGTGEEADRDLVFYGDFLPLYEKFEELTLLYNKVRNRLTQKPYSKDKIRLCFNKPKLMTGWVDSKTEKSDNGTQYGGYLFRKKNEIGEYDYFLGISSKAQLFRKNEAVIGDYERLDYYQPKANTIYGSAYEGENSYKEDKKRLNKVIIAYIEQIKQTNIKKSIIESISKYPNISDDDKVTPSSLLEKIKKVSIDSYNGILSFKSFQSVNKEVIDNLLKTISPLKNKAEFLDLINKDYQIFTEVQAVIDEICKQKTFIYFPISNVELEKEMGDKDKPLCLFQISNKDLSFAKTFSANLRKKRGAENLHTMLFKALMEGNQDNLDLGSGAIFYRAKSLDGNKPTHPANEAIKCRNVANKDKVSLFTYDIYKNRRYMENKFLFHLSIVQNYKAANDSAQLNSSATEYIRKADDLHIIGIDRGERNLLYYSVIDMKGNIVEQDSLNIIRNNDLETDYHDLLDKREKERKANRQNWEAVEGIKDLKKGYLSQAVHQIAQLMLKYNAIIALEDLGQMFVTRGQKIEKAVYQQFEKSLVDKLSYLVDKKRPYNELGGILKAYQLASSITKNNSDKQNGFLFYVPAWNTSKIDPVTGFTDLLRPKAMTIKEAQDFFGAFDNISYNDKGYFEFETNYDKFKIRMKSAQTRWTICTFGNRIKRKKDKNYWNYEEVELTEEFKKLFKDSNIDYENCNLKEEIQNKDNRKFFDDLIKLLQLTLQMRNSDDKGNDYIISPVANAEGQFFDSRNGDKKLPLDADANGAYNIARKGLWNIRQIKQTKNDKKLNLSISSTEWLDFVREKPYLK

SEQ ID NO: 823 - protein, 1129 aa, Alicyclobacillus acidoterrestris
MAVKSIKVKLRLDDMPEIRAGLWKLHKEVNAGVRYYTEWLSLLRQENLYRRSPNGDGEQECDKTAEECKAELLERLRARQVENGHRGPAGSDDELLQLARQLYELLVPQAIGAKGDAQQIARKFLSPLADKDAVGGLGIAKAGNKPRWVRMREAGEPGWEEEKEKAETRKSADRTADVLRALADFGLKPLMRVYTDSEMSSVEWKPLRKGQAVRTWDRDMFQQAIERMMSWESWNQRVGQEYAKLVEQKNRFEQKNFVGQEHLVHLVNQLQQDMKEASPGLESKEQTAHYVTGRALRGSDKVFEKWGKLAPDAPFDLYDAEIKNVQRRNTRRFGSHDLFAKLAEPEYQALWREDASFLTRYAVYNSILRKLNHAKMFATFTLPDATAHPIWTRFDKLGGNLHQYTFLFNEFGERRHAIRFHKLLKVENGVAREVDDVTVPISMSEQLDNLLPRDPNEPIALYFRDYGAEQHFTGEFGGAKIQCRRDQLAHMHRRRGARDVYLNVSVRVQSQSEARGERRPPYAAVFRLVGDNHRAFVHFDKLSDYLAEHPDDGKLGSEGLLSGLRVMSVDLGLRTSASISVFRVARKDELKPNSKGRVPFFFPIKGNDNLVAVHERSQLLKLPGETESKDLRAIREERQRTLRQLRTQLAYLRLLVRCGSEDVGRRERSWAKLIEQPVDAANHMTPDWREAFENELQKLKSLHGICSDKEWMDAVYESVRRVWRHMGKQVRDWRKDVRSGERPKIRGYAKDVVGGNSIEQIEYLERQYKFLKSWSFFGKVSGQVIRAEKGSRFAITLREHIDHAKEDRLKKLADRIIMEALGYVYALDERGKGKWVAKYPPCQLILLEELSEYQFNNDRPPSENNQLMQWSHRGVFQELINQAQVHDLLVGTMYAAFSSRFDARTGAPGIRCRRVPARCTQEHNPEPFPWWLNKFVVEHTLDACPLRADDLIPTGEGEIFVSPFSAEEGDFHQIHADLNAAQNLQQRLWSDFDISQIRLRCDWGEVDGELVLIPRLTGKRTADSYSNKVFYTNTGVTYYERERGKKRRKVFAQEKLSEEEAELLVEADEAREKSVVLMRDPSGIINRGNWTRQKEFWSMVNQRIEGYLVKQIRSRVPLQDSACENTGDI

SEQ ID NO: 824 - protein, 872 aa, Alicyclobacillus contaminans
MGFNTAELLRKVEEEMRKTSVGFDTDNPFAHRITRRAIRGWDRIAEAWRRLPPDAPESEYIEAFKDIQRKNPRKIGSEPLFKNLAAPGVRSELLNNPQVLITFAKYNELQRQLAKAKQFAQKTLPHPVFHPVWVRYDKLGGNLHHYQIEPAVHANDTHKVKFSSLLLPQEDGSYAEVKDVTVSLAPSLQFPTGLVHPKVTTPPRTGLVTVMDEEAGKPVVCYRDRGHDALVPVAFGGAKLQFNRAHLSAGYRKGVLSAGGGGSIYFNVTLDVQVPNERDVSKTFSFSRDRDLVSLKAEELKRYMETKPLGMPGVRVMSVDLGVRYGAAISVFEVKPFAEVRKDKLHYPITGCEGFVAEHERSVILKLPGEGVRTAGKQSERKQALAAIRAEMSILRKWLRVSQVTEEDRAKAVRGLLEDERGGGWTMDPGEDSDHQPLQQFLHEARLAVGELVNLVHLSPAEWERAVIERHRRLERITASHIRVFQTMRKVWGKRRNEDAAHTGGISLAHIEHLIQQRKLFIRWSTHARTYGEVRRLPKHEGFAKRLQKHTNHVKEDRIKKLADMIVMAARGYRFLDKRARWVKTRHAPCDLILFEDLSRYRFTMDRPPTENSQLMNWSHRELLKTVKMQAALFGIGVGTVPAAFTSRFDAQTGAPGLRCKRVTKQDKEKTPFWLIQFAEITGVNVTNVEPGQLIPVDGGEWFVSPKGPRAADGLKCVHADINAAHNLQRRFWIPRLPSVKCRRYVEAEGFAAVPSSTAFMKVHGKGAFVSVDGEFYEYQKGRRVAVNRADRTSSTLDEDEGDIGEEMLVSSNGAGEFVRMFYDESGYVGYGRWMDSKVFWGKVRQIVHRAIQDQVEKRAAARGENGATSSR

SEQ ID NO: 825 - protein, 1149 aa, Desulfovibrio inopinatus
MPTRTINLKLVLGKNPENATLRRALFSTHRLVNQATKRIEEFLLLCRGEAYRTVDNEGKEAEIPRHAVQEEALAFAKAAQRHNGCISTYEDQEILDVLRQLYERLVPSVNENNEAGDAQAANAWVSPLMSAESEGGLSVYDKVLDPPPVWMKLKEEKAPGWEAASQIWIQSDEGQSLLNKPGSPPRWIRKLRSGQPWQDDFVSDQKKKQDELTKGNAPLIKQLKEMGLLPLVNPFFRHLLDPEGKGVSPWDRLAVRAAVAHFISWESWNHRTRAEYNSLKLRRDEFEAASDEFKDDFTLLRQYEAKRHSTLKSIALADDSNPYRIGVRSLRAWNRVREEWIDKGATEEQRVTILSKLQTQLRGKFGDPDLFNWLAQDRHVHLWSPRDSVTPLVRINAVDKVLRRRKPYALMTFAHPRFHPRWILYEAPGGSNLRQYALDCTENALHITLPLLVDDAHGTWIEKKIRVPLAPSGQIQDLTLEKLEKKKNRLYYRSGFQQFAGLAGGAEVLFHRPYMEHDERSEESLLERPGAVWFKLTLDVATQAPPNWLDGKGRVRTPPEVHHFKTALSNKSKHTRTLQPGLRVLSVDLGMRTFASCSVFELIEGKPETGRAFPVADERSMDSPNKLWAKHERSFKLTLPGETPSRKEEEERSIARAEIYALKRDIQRLKSLLRLGEEDNDNRRDALLEQFFKGWGEEDVVPGQAFPRSLFQGLGAAPFRSTPELWRQHCQTYYDKAEACLAKHISDWRKRTRPRPTSREMWYKTRSYHGGKSIWMLEYLDAVRKLLLSWSLRGRTYGAINRQDTARFGSLASRLLHHINSLKEDRIKTGADSIVQAARGYIPLPHGKGWEQRYEPCQLILFEDLARYRFRVDRPRRENSQLMQWNHRAIVAETTMQAELYGQIVENTAAGFSSRFHAATGAPGVRCRFLLERDFDNDLPKPYLLRELSWMLGNTKVESEEEKLRLLSEKIRPGSLVPWDGGEQFATLHPKRQTLCVIHADMNAAQNLQRRFFGRCGEAFRLVCQPHGDDVLRLASTPGARLLGALQQLENGQGAFELVRDMGSTSQMNRFVMKSLGKKKIKPLQDNNGDDELEDVLSVLPEEDDTGRITVFRDSSGIFFPCNVWIPAKQFWPAVRAMIWKVMASHSLG

SEQ ID NO: 826 - protein, 1194 aa, Desulfonatronum thiodismutans
MVLGRKDDTAELRRALWTTHEHVNLAVAEVERVLLRCRGRSYWTLDRRGDPVHVPESQVAEDALAMAREAQRRNGWPVVGEDEEILLALRYLYEQIVPSCLLDDLGKPLKGDAQKIGTNYAGPLFDSDTCRRDEGKDVACCGPFHEVAGKYLGALPEWATPISKQEFDGKDASHLRFKATGGDDAFFRVSIEKANAWYEDPANQDALKNKAYNKDDWKKEKDKGISSWAVKYIQKQLQLGQDPRTEVRRKLWLELGLLPLFIPVFDKTMVGNLWNRLAVRLALAHLLSWESWNHRAVQDQALARAKRDELAALFLGMEDGFAGLREYELRRNESIKQHAFEPVDRPYVVSGRALRSWTRVREEWLRHGDTQESRKNICNRLQDRLRGKFGDPDVFHWLAEDGQEALWKERDCVTSFSLLNDADGLLEKRKGYALMTFADARLHPRWAMYEAPGGSNLRTYQIRKTENGLWADVVLLSPRNESAAVEEKTFNVRLAPSGQLSNVSFDQIQKGSKMVGRCRYQSANQQFEGLLGGAEILFDRKRIANEQHGATDLASKPGHVWFKLTLDVRPQAPQGWLDGKGRPALPPEAKHFKTALSNKSKFADQVRPGLRVLSVDLGVRSFAACSVFELVRGGPDQGTYFPAADGRTVDDPEKLWAKHERSFKITLPGENPSRKEEIARRAAMEELRSLNGDIRRLKAILRLSVLQEDDPRTEHLRLFMEAIVDDPAKSALNAELFKGFGDDRFRSTPDLWKQHCHFFHDKAEKVVAERFSRWRTETRPKSSSWQDWRERRGYAGGKSYWAVTYLEAVRGLILRWNMRGRTYGEVNRQDKKQFGTVASALLHHINQLKEDRIKTGADMIIQAARGFVPRKNGAGWVQVHEPCRLILFEDLARYRFRTDRSRRENSRLMRWSHREIVNEVGMQGELYGLHVDTTEAGFSSRYLASSGAPGVRCRHLVEEDFHDGLPGMHLVGELDWLLPKDKDRTANEARRLLGGMVRPGMLVPWDGGELFATLNAASQLHVIHADINAAQNLQRRFWGRCGEAIRIVCNQLSVDGSTRYEMAKAPKARLLGALQQLKNGDAPFHLTSIPNSQKPENSYVMTPTNAGKKYRAGPGEKSSGEEDELALDIVEQAEELAQGRKTFFRDPSGVFFAPDRWLPSEIYWSRIRRRIWQVTLERNSSGRQERAEMDEMPY

SEQ ID NO: 827 - protein, 1132 aa, Tuberibacillus calidus
MATKSFILKMKTKNNPQLRLSLWKTHELFNFGVAYYMDLLSLFRQKDLYMHNDEDPDHPVVLKKEEIQERLWMKVRETQQKNGFHGEVSKDEVLETLRALYEELVPSAVGKSGEANQISNKYLYPLTDPASQSGKGTANSGRKPRWKKLKEAGDPSWKDAYEKWEKERQEDPKLKILAALQSFGLIPLFRPFTENDHKAVISVKWMPKSKNQSVRKFDKDMFNQAIERFLSWESWNEKVAEDYEKTVSIYESLQKELKGISTKAFEIMERVEKAYEAHLREITFSNSTYRIGNRAIRGWTEIVKKWMKLDPSAPQGNYLDVVKDYQRRHPRESGDFKLFELLSRPENQAAWREYPEFLPLYVKYRHAEQRMKTAKKQATFTLCDPIRHPLWVRYEERSGTNLNKYRLIMNEKEKVVQFDRLICLNADGHYEEQEDVTVPLAPSQQFDDQIKFSSEDTGKGKHNFSYYHKGINYELKGTLGGARIQFDREHLLRRQGVKAGNVGRIFLNVTLNIEPMQPFSRSGNLQTSVGKALKVYVDGYPKVVNFKPKELTEHIKESEKNTLTLGVESLPTGLRVMSVDLGQRQAAAISIFEVVSEKPDDNKLFYPVKDTDLFAVHRTSFNIKLPGEKRTERRMLEQQKRDQAIRDLSRKLKFLKNVLNMQKLEKTDEREKRVNRWIKDREREEENPVYVQEFEMISKVLYSPHSVWVDQLKSIHRKLEEQLGKEISKWRQSISQGRQGVYGISLKNIEDIEKTRRLLFRWSMRPENPGEVKQLQPGERFAIDQQNHLNHLKDDRIKKLANQIVMTALGYRYDGKRKKWIAKHPACQLVLFEDLSRYAFYDERSRLENRNLMRWSRREIPKQVAQIGGLYGLLVGEVGAQYSSRFHAKSGAPGIRCRVVKEHELYITEGGQKVRNQKFLDSLVENNIIEPDDARRLEPGDLIRDQGGDKFATLDERGELVITHADINAAQNLQKRFWTRTHGLYRIRCESREIKDAVVLVPSDKDQKEKMENLFGIGYLQPFKQENDVYKWVKGEKIKGKKTSSQSDDKELVSEILQEASVMADELKGNRKTLFRDPSGYVFPKDRWYTGGRYFGTLEHLLKRKLAERRLFDGGSSRRGLFNGTDSNTNVE

SEQ ID NO: 828 - protein, 1108 aa, Bacillus thermoamylovorans
MATRSFILKIEPNEEVKKGLWKTHEVLNHGIAYYMNILKLIRQEAIYEHHEQDPKNPKKVSKAEIQAELWDFVLKMQKCNSFTHEVDKDVVFNILRELYEELVPSSVEKKGEANQLSNKFLYPLVDPNSQSGKGTASSGRKPRWYNLKIAGDPSWEEEKKKWEEDKKKDPLAKILGKLAEYGLIPLFIPFTDSNEPIVKEIKWMEKSRNQSVRRLDKDMFIQALERFLSWESWNLKVKEEYEKVEKEHKTLEERIKEDIQAFKSLEQYEKERQEQLLRDTLNTNEYRLSKRGLRGWREIIQKWLKMDENEPSEKYLEVFKDYQRKHPREAGDYSVYEFLSKKENHFIWRNHPEYPYLYATFCEIDKKKKDAKQQATFTLADPINHPLWVRFEERSGSNLNKYRILTEQLHTEKLKKKLTVQLDRLIYPTESGGWEEKGKVDIVLLPSRQFYNQIFLDIEEKGKHAFTYKDESIKFPLKGTLGGARVQFDRDHLRRYPHKVESGNVGRIYFNMTVNIEPTESPVSKSLKIHRDDFPKFVNFKPKELTEWIKDSKGKKLKSGIESLEIGLRVMSIDLGQRQAAAASIFEVVDQKPDIEGKLFFPIKGTELYAVHRASFNIKLPGETLVKSREVLRKAREDNLKLMNQKLNFLRNVLHFQQFEDITEREKRVTKWISRQENSDVPLVYQDELIQIRELMYKPYKDWVAFLKQLHKRLEVEIGKEVKHWRKSLSDGRKGLYGISLKNIDEIDRTRKFLLRWSLRPTEPGEVRRLEPGQRFAIDQLNHLNALKEDRLKKMANTIIMHALGYCYDVRKKKWQAKNPACQIILFEDLSNYNPYEERSRFENSKLMKWSRREIPRQVALQGEIYGLQVGEVGAQFSSRFHAKTGSPGIRCSVVTKEKLQDNRFFKNLQREGRLTLDKIAVLKEGDLYPDKGGEKFISLSKDRKLVTTHADINAAQNLQKRFWTRTHGFYKVYCKAYQVDGQTVYIPESKDQKQKIIEEFGEGYFILKDGVYEWGNAGKLKIKKGSSKQSSSELVDSDILKDSFDLASELKGEKLMLYRDPSGNVFPSDKWMAAGVFFGKLERILISKLTNQYSISTIEDDSSKQSM

SEQ ID NO: 829 - protein, 1108 aa, unknown
  Synthetic Sequence
MAIRSIKLKLKTHTGPEAQNLRKGIWRTHRLLNEGVAYYMKMLLLFRQESTGERPKEELQEELICHIREQQQRNQADKNTQALPLDKALEALRQLYELLVPSSVGQSGDAQIISRKFLSPLVDPNSEGGKGTSKAGAKPTWQKKKEANDPTWEQDYEKWKKRREEDPTASVITTLEEYGIRPIFPLYTNTVTDIAWLPLQSNQFVRTWDRDMLQQAIERLLSWESWNKRVQEEYAKLKEKMAQLNEQLEGGQEWISLLEQYEENRERELRENMTAANDKYRITKRQMKGWNELYELWSTFPASASHEQYKEALKRVQQRLRGRFGDAHFFQYLMEEKNRLIWKGNPQRIHYFVARNELTKRLEEAKQSATMTLPNARKHPLWVRFDARGGNLQDYYLTAEADKPRSRRFVTFSQLIWPSESGWMEKKDVEVELALSRQFYQQVKLLKNDKGKQKIEFKDKGSGSTFNGHLGGAKLQLERGDLEKEEKNFEDGEIGSVYLNVVIDFEPLQEVKNGRVQAPYGQVLQLIRRPNEFPKVTTYKSEQLVEWIKASPQHSAGVESLASGFRVMSIDLGLRAAAATSIFSVEESSDKNAADFSYWIEGTPLVAVHQRSYMLRLPGEQVEKQVMEKRDERFQLHQRVKFQIRVLAQIMRMANKQYGDRWDELDSLKQAVEQKKSPLDQTDRTFWEGIVCDLTKVLPRNEADWEQAVVQIHRKAEEYVGKAVQAWRKRFAADERKGIAGLSMWNIEELEGLRKLLISWSRRTRNPQEVNRFERGHTSHQRLLTHIQNVKEDRLKQLSHAIVMTALGYVYDERKQEWCAEYPACQVILFENLSQYRSNLDRSTKENSTLMKWAHRSIPKYVHMQAEPYGIQIGDVRAEYSSRFYAKTGTPGIRCKKVRGQDLQGRRFENLQKRLVNEQFLTEEQVKQLRPGDIVPDDSGELFMTLTDGSGSKEVVFLQADINAAHNLQKRFWQRYNELFKVSCRVIVRDEEEYLVPKTKSVQAKLGKGLFVKKSDTAWKDVYVWDSQAKLKGKTTFTEESESPEQLEDFQEIIEEAEEAKGTYRTLFRDPSGVFFPESVWYPQKDFWGEVKRKLYGKLRERFLTKAR

SEQ ID NO: 830 - protein, 658 aa, Methylobacterium nodulans
MLTKQDKQQKITYCTNMNEVFEAKLGSADLLLNWDHLRGRIRDRVDAGDIGSAFLKLALDVAHVLPDGVDDQLARAAFHFQSAKGAKSKHADSVQAGLRVLSIDLGVRSFATCSVFELKDTAPTTGVAFPLAEFRLWAVHERSFTLELPGENVGAAGQQWRAQADAELRQLRGGLNRHRQLLRAATVQKGERDAYLTDLREAWSAKELWPFEASLLSELERCSTVADPLWQDTCKRAARLYRTEFGAVVSEWRSRTRSREDRKYAGKSMWSVQHLTDVRRFLQSWSLAGRASGDIRRLDRERGGVFAKDLLDHIDALKDDRLKTGADLIVQAARGFQRNEFGYWVQKHAPCHVILFEDLSRYRMRTDRPRRENSQLMQWAHRGVPDMVGMQGEIYGIQDRRDPDSARKHARQPLAAFCLDTPAAFSSRYHASTMTPGIRCHPLRKREFEDQGFLELLKRENEGLDLNGYKPGDLVPLPGGEVFVCLNANGLSRIHADINAAQNLQRRFWTQHGDAFRLPCGKSAVQGQIRWAPLSMGKRQAGALGGFGYLEPTGHDSGSCQWRKTTEAEWRRLSGAQKDRDEAAAAEDEELQGLEEELLERSGERVVFFRDPSGVVLPTDLWFPSAAFWSIVRAKTVGRLRSHLDAQAEASYAVAAGL

SEQ ID NO: 831 - protein, 1302 aa, unknown
  Synthetic Sequence
MKKFELKQNFRNNYSGKTLRNFRQTLAQIANKKSSDSILTIKFKLDCSKTGKLPKYENLISLYDTIEDIKKGTLSYYLFTLIVSGFKFFGSASQAKAFSTKDIFKDNDFYNQFKIQSHLDLPDFVPSKIYQRLKKNVRSTNGKDNAFKASVIVAEYRKEIGKLKNKDESSEHQCEELFKKIGTALETRFSSWQDLINNCSTGCEIIDEILNDSFGTLPSIKKMVLASTTQSSDGEQDGIAIAYDPDSTFIKSDELLNPYFAVATILKSMPPEIQQDKKSAYVKANLTTPTHNALSWIFGKGLTLFQTESTEKLCAMFNVSDKRVIEQVQDAAKAVKLPAELDLNHCTLKFQDFRSSLGGHLDSWTTNYLKRLDELNDLLLNLPKNLSLPDIFMIDGKDFIEYSGCNRDEIQQMIDFVVNEQNRIKLQESLNALLGKGNNQICSDDISTVKDFSEIVNSLHSFVQQIDNSLEQSSNEANSIFSELKKKIEKNEKWDIWKNNLKKIPKLNKLSGGVPDAWKEIREIEQKFHEISENQKKHFTEVMEWIDAGNGTIDIFESRFKYDELLKKSKKNNLQSADELAFRSVLNKLGRFARQGNDLVCEKIKNWFKEQNIFDSSKDFNRYFINQKGFIFKHPSSKKDNSPYNLSANLLEKRYEVTNTVGALLEQCESDPAIVNDPFSMRSLVEFRALWFSINISGISKEQHIPTKIAQPKLDDSTYQESVSPTLKYRLEKEQITSSELNSIFTVYKSLLSGLSIRLSRNSFYLRTKFSWIGNNSLIYCPKETTWKIPAAYFKSDLWNEYKDKQILIVNEEYDVDVVKTFESVYKIVKSKDNNEKNRILPLLKQLPHDWMFKLPFGASNAEKCKVLKLEKNNKKFKPLSVSKDSLARLSGPSTYFNQIDEIMMNDESELSEMTLLADEPVRQQMSNGKIEIIPDDYVMSLAIPITRSLKKGNTESFPFKNIVSIDQGEAGFAYAVFKLSDCGNERAEPIATGLIPIPSIRRLIHSVKKYRGKKQRIQNFNQKFDSTMFTLRENVTGDICGLIVALMKKYNAFPILEKQVGNLESGSKQLMLVYKAVNSKFLAAKVDMQNDQRRSWWYQGNSWNTPILRISNPNQSNNKNIVKNINGKKYEELKIYPGYSVSAYMTSCICHVCGRNALELLKNDDSTGKVKKYQINQDGEVTIGGEVIKLYRKPDRLTPVKNLAKKGNRERTYASINERAPTVSVQKAELSADELQKIIKKNMRRAPRSLMSKDTTQSRYFCVFKNCPCHNKEQHADVNAAINIGRRFLKDCILDDNKEKD

SEQ ID NO: 832 - protein, 1255 aa, unknown
  Synthetic Sequence
MRSNYHGGRNARQWRKQISGLARRTKETVFTYKFPLETDAAEIDFDKAVQTYGIAEGVGHGSLIGLVCAFHLSGFRLFSKAGEAMAFRNRSRYPTDAFAEKLSAIMGIQLPTLSPEGLDLIFQSPPRSRDGIAPVWSENEVRNRLYTNWTGRGPANKPDEHLLEIAGEIAKQVFPKFGGWDDLASDPDKALAAADKYFQSQGDFPSIASLPAAIMLSPANSTVDFEGDYIAIDPAAETLLHQAVSRCAARLGRERPDLDQNKGPFVSSLQDALVSSQNNGLSWLFGVGFQHWKEKSPKELIDEYKVPADQHGAVTQVKSFVDAIPLNPLFDTTHYGEFRASVAGKVRSWVANYWKRLLDLKSLLATTEFTLPESISDPKAVSLFSGLLVDPQGLKKVADSLPARLVSAEEAIDRLMGVGIPTAADIAQVERVADEIGAFIGQVQQFNNQVKQKLENLQDADDEEFLKGLKIELPSGDKEPPAINRISGGAPDAAAEISELEEKLQRLLDARSEHFQTISEWAEENAVTLDPIAAMVELERLRLAERGATGDPEEYALRLLLQRIGRLANRVSPVSAGSIRELLKPVFMEEREFNLFFHNRLGSLYRSPYSTSRHQPFSIDVGKAKAIDWIAGLDQISSDIEKALSGAGEALGDQLRDWINLAGFAISQRLRGLPDTVPNALAQVRCPDDVRIPPLLAMLLEEDDIARDVCLKAFNLYVSAINGCLFGALREGFIVRTRFQRIGTDQIHYVPKDKAWEYPDRLNTAKGPINAAVSSDWIEKDGAVIKPVETVRNLSSTGFAGAGVSEYLVQAPHDWYTPLDLRDVAHLVTGLPVEKNITKLKRLTNRTAFRMVGASSFKTHLDSVLLSDKIKLGDFTIIIDQHYRQSVTYGGKVKISYEPERLQVEAAVPVVDTRDRTVPEPDTLFDHIVAIDLGERSVGFAVFDIKSCLRTGEVKPIHDNNGNPVVGTVAVPSIRRLMKAVRSHRRRRQPNQKVNQTYSTALQNYRENVIGDVCNRIDTLMERYNAFPVLEFQIKNFQAGAKQLEIVYGSVLHRYTFSGVDAHKAKRREYWYNGELWEHPYLMAKKWNEETNSMSGAPKPVSLFPGVTVNAARTSQICHQCQRNPMSHLRGLTGTIEISSDGLLELDDGTIRLFETSDYDEDKFKQSRREKRRLDANVLLSGRHRAEYIYTVAKRNLRRPPKNVMTKDTTQSRYTCLYKNCSWTGHADENAAINIGRRYLAERIDMPASKTKAAV

SEQ ID NO: 833 - protein, 1266 aa, unknown
  Synthetic Sequence
MRPRFHGGMNARDWRKHVGVLAQQHKETTRTYTFPLDTTGSAIDFDAALQAYNAVEGVGYGSLLGLACAVHLSGFRLFSTGKEAATFRNRARYPNAAFQAALRKELGTTITTLTPETLDRLFSSRPKRRNGVPLPWNQDSIRDRLYTNWVKPRPGDTPDAVLFQIATGIAQEITEDVSSWTDLAKNSDRGLKAAHRYFARVGGFPAFDNLTPPATVQPTDTTIDYDPNAPFHLVSHADQTLIHQSISLCAHRIRQEDPALDPNKSGFIKQLQNNFLSQTFYGLSWLFGAGYVHFRECTANDLAIQYGIPNNCRDGIHQIKSFADAILPNTFFEKKHYRKDSRSVGKKAKSWISNYWQRLLQLQTWVDDHTWVTLPQELTEAQFKPLFRGLLVDAVELMAIAERLPQRLADCRDSLDCLMGKGPQAATKNDVEIVEKVREEIESFVGQIEQLGNQLRHQLENENNDQVHRDNLHQLKNRLPLDLRRPQALNKISGGVPDVAKSIRGLETQLDQVLKERRSHFGRLTKWAKECGITLDPLQPLIESEKQRVAERGSAHDAKELAIRLLLQRIGRLGHRLSPTNATAIQELLRPVFAVKREFNLFFHNHMGALYRSPYSTSRHQPFQINVDVAHGTDWIGTIETLIQNLFTQIQDDALLRDLVQLEGFVFSHKLRALPGVIPSELARPNNLQQMGLPALLLVLLQADQVHRETVLRVFNLYGSAINGYLFQALRPGFIVRAGFQRLETKKLRYVPKAQSWQYPDRLHHAKSAIKNSLSAGWIKKNHQGAILPQKTLTALVKQKSLKDTGVPEYLVQAPHDWYVPIDLRGPAIPIEGLTVGTEGPELTQLGPMKDDCAFRAIGPSSFKSKIDAGLLPQDVKYGDMTLIFDQHYQQSISFANGTFSIQYQPTSLQVKAAIPVVDKRPRDTRNNSHLYDRIVAIDLGERKIGYAIFDLKQVLKSEQLEPMREDGKPLIGSISIRSIRGLMKAVQTHRNRRQPNYRIDQTYSKALMHYRESVIGDVCNAIDTLCARYGGFPVLESSVRNFEVGSAQLKTVYGSVSRRYTWSAVDAHKNQRQQYWLGGTKDKIPIWTHPYLMTREWDEKNSKWSNRSKPLKMHPGVEVHPAGTSQICHQCKRNPIGALWNVADTVVLDDQGQLDLDDGTIRLNSGYIDTTEIKRARRKKIRLPENKPLTGSHKTSHVRAVARRNLRQPPKSTRAKDTTQSRYTCLYVDCGHECHADENAAINIGRKYLQERIHIEASRQALSTR

SEQ ID NO: 834 - protein, 1269 aa, unknown
  Synthetic Sequence
MVAGLKKIKRDGVTMKSNYHGGVKARAWRKRIGGLARRQKETVFTYKFPLETEEAGIDFDKAVQTYGIAEGISQGSLIGLVCAFHLSGFRLFSKADETKAFCNQGRYPNQAFAEKLRNELSVTLPKLSPQSLDVLFQSSPKSKNGVAPEWSKNAIRNRLYTNWTGKGAGTNPDEHLLEIAEDIAAEIDSDLDGWKDLEEHPEKGLSAADRYFQAQGDFPSLTGLPPSVPLTPQNSTVAFEGDPVCLNPSDNTLLHQAVARCAGRILQEQPNLSPDKNRFINQLQDELVSSQNNGLSWLFGVGFKYWKEMSVDQLADDYKVKSTDLDALKQVKSFIDAIPLNPLFDTPHYGEFRASVAGKMRSWVKNYWKRLLDLKSQLGTANINLPEGLDEQRAENLFSGLLIDSKGLRQVTDKLPSRLKKAEDTIDRLMGDGNPTSDDIEQVETVAAEISAFIGQVEQFNNQLEQRLENPLEGDDETFLKQLKIDLPAEFKKPPAINRISGGSPDPTAEIAELEEKLDRLMSARKEHYETIAEWASANKVTLDPMEAMTTLEAQRLTERGAEGDQEEFALRLLLQRIGRLANRLSPQGATAIRDLLRPVFTEKREFNLFFHNRMGSLYRSPYSTSRHQPFTIDVAVAKNTDWMDALDGIAETIMKGLSQAGDELSLRLRDWINISGFSLSQRLRGLPDTVPGELALVRSADDVRIPPMLALQLEEDEVSREVCLKAFNLYVSAINGCLFRALREGFIVRTKFQRLERDVLSYVPKTKLWNYPQRLDTARGPIHSALAAAWINKEGSVIDPVETVTALSDTGFSDDGIPEYLVQAPHDWYTPIDLRDISKPVSGLPVKKNITGLKRQKKQTAFRMVGPSSFKSHLDSTLLSEEVKLGDFTLIFDQYYKQRVSYNGRVKITFEPDRLHVEAAVPVIDKRVRPSTEEDALFDHLLAIDLGEKRVGYAVYDIKACLRTGDIKPLEDGDGKPIVGSVAVPSIRRLMKAVRSHRQQRQPNQKVNQTYSTALMNYRENVIGDVCNRIDTLMEKYNAFPVLESSVMNFEAGSRQLEMVYGSVLHRYTYSKIDAHTAKRKEYWYTGEYWDHPYLMAHKWNERTRSYSGSLSALTLYPGVMVHPAGTSQRCHQCKRNPMVEIKQLTGQVEINADGSLELDDGTICLYEGYDYSPEEYKKAKREKRRLDPNVPLSGRHQAKHVSAVAKRNLRRPTVSMMSGDTTQARYVCLYTDCDFTGHADENAAINIGWKYLTERIALSESKDKAGV

SEQ ID NO: 835 - protein, 1340 aa, unknown
  Synthetic Sequence
MQISKVNHKHVAVGQKDRERITGFIYNDPVGDEKSLEDVVAKRANDTKVLFNVFNTKDLYDSQESDKSEKDKEIISKGAKFVAKSFNSAITILKKQNKIYSTLTSQQVIKELKDKFGGARIYDDDIEEALTETLKKSFRKENVRNSIKVLIENAAGIRSSLSKDEEELIQEYFVKQLVEEYTKTKLQKNVVKSIKNQNMVIQPDSDSQVLSLSESRREKQSSAVSSDTLVNCKEKDVLKAFLTDYAVLDEDERNSLLWKLRNLVNLYFYGSESIRDYSYTKEKSVWKEHDEQKANKTLFIDEICHITKIGKNGKEQKVLDYEENRSRCRKQNINYYRSALNYAKNNTSGIFENEDSNHFWIHLIENEVERLYNGIENGEEFKFETGYISEKVWKAVINHLSIKYIALGKAVYNYAMKELSSPGDIEPGKIDDSYINGITSFDYEIIKAEESLQRDISMNVVFATNYLACATVDTDKDFLLFSKEDIRSCTKKDGNLCKNIMQFWGGYSTWKNFCEEYLKDDKDALELLYSLKSMLYSMRNSSFHFSTENVDNGSWDTELIGKLFEEDCNRAARIEKEKFYNNNLHMFYSSSLLEKVLERLYSSHHERASQVPSFNRVFVRKNFPSSLSEQRITPKFTDSKDEQIWQSAVYYLCKEIYYNDFLQSKEAYKLFREGVKNLDKNDINNQKAADSFKQAVVYYGKAIGNATLSQVCQAIMTEYNRQNNDGLKKKSAYAEKQNSNKYKHYPLFLKQVLQSAFWEYLDENKEIYGFISAQIHKSNVEIKAEDFIANYSSQQYKKLVDKVKKTPELQKWYTLGRLINPRQANQFLGSIRNYVQFVKDIQRRAKENGNPIRNYYEVLESDSIIKILEMCTKLNGTTSNDIHDYFRDEDEYAEYISQFVNFGDVHSGAALNAFCNSESEGKKNGIYYDGINPIVNRNWVLCKLYGSPDLISKIISRVNENMIHDFHKQEDLIREYQIKGICSNKKEQQDLRTFQVLKNRVELRDIVEYSEIINELYGQLIKWCYLRERDLMYFQLGFHYLCLNNASSKEADYIKINVDDRNISGAILYQIAAMYINGLPVYYKKDDMYVALKSGKKASDELNSNEQTSKKINYFLKYGNNILGDKKDQLYLAGLELFENVAEHENIIIFRNEIDHFHYFYDRDRSMLDLYSEVFDRFFTYDMKLRKNVVNMLYNILLDHNIVSSFVFETGEKKVGRGDSEVIKPSAKIRLRANNGVSSDVFTYKVGSKDELKIATLPAKNEEFLLNVARLIYYPDMEAVSENMVREGVVKVEKSNDKKGKISRGSNTRSSNQSKYNNKSKNRMNYSMGSIFEKMDLKFD

SEQ ID NO: 836 - protein, 1437 aa, unknown
  Synthetic Sequence
MKISKVREENRGAKLTVNAKTAVVSENRSQEGILYNDPSRYGKSRKNDEDRDRYIESRLKSSGKLYRIFNEDKNKRETDELQWFLSEIVKKINRRNGLVLSDMLSVDDRAFEKAFEKYAELSYTNRRNKVSGSPAFETCGVDAATAERLKGIISETNFINRIKNNIDNKVSEDIIDRIIAKYLKKSLCRERVKRGLKKLLMNAFDLPYSDPDIDVQRDFIDYVLEDFYHVRAKSQVSRSIKNMNMPVQPEGDGKFAITVSKGGTESGNKRSAEKEAFKKFLSDYASLDERVRDDMLRRMRRLVVLYFYGSDDSKLSDVNEKFDVWEDHAARRVDNREFIKLPLENKLANGKTDKDAERIRKNTVKELYRNQNIGCYRQAVKAVEEDNNGRYFDDKMLNMFFIHRIEYGVEKIYANLKQVTEFKARTGYLSEKIWKDLINYISIKYIAMGKAVYNYAMDELNASDKKEIELGKISEEYLSGISSFDYELIKAEEMLQRETAVYVAFAARHLSSQTVELDSENSDFLLLKPKGTMDKNDKNKLASNNILNFLKDKETLRDTILQYFGGHSLWTDFPFDKYLAGGKDDVDFLTDLKDVIYSMRNDSFHYATENHNNGKWNKELISAMFEHETERMTVVMKDKFYSNNLPMFYKNDDLKKLLIDLYKDNVERASQVPSFNKVFVRKNFPALVRDKDNLGIELDLKADADKGENELKFYNALYYMFKEIYYNAFLNDKNVRERFITKATKVADNYDRNKERNLKDRIKSAGSDEKKKLREQLQNYIAENDFGQRIKNIVQVNPDYTLAQICQLIMTEYNQQNNGCMQKKSAARKDINKDSYQHYKMLLLVNLRKAFLEFIKENYAFVLKPYKHDLCDKADFVPDFAKYVKPYAGLISRVAGSSELQKWYIVSRFLSPAQANHMLGFLHSYKQYVWDIYRRASETGTEINHSIAEDKIAGVDITDVDAVIDLSVKLCGTISSEISDYFKDDEVYAEYISSYLDFEYDGGNYKDSLNRFCNSDAVNDQKVALYYDGEHPKLNRNIILSKLYGERRFLEKITDRVSRSDIVEYYKLKKETSQYQTKGIFDSEDEQKNIKKFQEMKNIVEFRDLMDYSEIADELQGQLINWIYLRERDLMNFQLGYHYACLNNDSNKQATYVTLDYQGKKNRKINGAILYQICAMYINGLPLYYVDKDSSEWTVSDGKESTGAKIGEFYRYAKSFENTSDCYASGLEIFENISEHDNITELRNYIEHFRYYSSFDRSFLGIYSEVFDRFFTYDLKYRKNVPTILYNILLQHFVNVRFEFVSGKKMIGIDKKDRKIAKEKECARITIREKNGVYSEQFTYKLKNGTVYVDARDKRYLQSIIRLLFYPEKVNMDEMIEVKEKKKPSDNNTGKGYSKRDRQQDRKEYDKYKEKKKKEGNFLSGMGGNINWDEINAQLKN

SEQ ID NO: 837 - protein, 1385 aa, Clostridium aminophilum
MKFSKVDHTRSAVGIQKATDSVHGMLYTDPKKQEVNDLDKRFDQLNVKAKRLYNVFNQSKAEEDDDEKRFGKVVKKLNRELKDLLFHREVSRYNSIGNAKYNYYGIKSNPEEIVSNLGMVESLKGERDPQKVISKLLLYYLRKGLKPGTDGLRMILEASCGLRKLSGDEKELKVFLQTLDEDFEKKTFKKNLIRSIENQNMAVQPSNEGDPIIGITQGRFNSQKNEEKSAIERMMSMYADLNEDHREDVLRKLRRLNVLYFNVDTEKTEEPTLPGEVDTNPVFEVWHDHEKGKENDRQFATFAKILTEDRETRKKEKLAVKEALNDLKSAIRDHNIMAYRCSIKVTEQDKDGLFFEDQRINRFWIHHIESAVERILASINPEKLYKLRIGYLGEKVWKDLLNYLSIKYIAVGKAVFHFAMEDLGKTGQDIELGKLSNSVSGGLTSFDYEQIRADETLQRQLSVEVAFAANNLFRAVVGQTGKKIEQSKSEENEEDFLLWKAEKIAESIKKEGEGNTLKSILQFFGGASSWDLNHFCAAYGNESSALGYETKFADDLRKAIYSLRNETFHFTTLNKGSFDWNAKLIGDMFSHEAATGIAVERTRFYSNNLPMFYRESDLKRIMDHLYNTYHPRASQVPSFNSVFVRKNFRLFLSNTLNTNTSFDTEVYQKWESGVYYLFKEIYYNSFLPSGDAHHLFFEGLRRIRKEADNLPIVGKEAKKRNAVQDFGRRCDELKNLSLSAICQMIMTEYNEQNNGNRKVKSTREDKRKPDIFQHYKMLLLRTLQEAFAIYIRREEFKFIFDLPKTLYVMKPVEEFLPNWKSGMFDSLVERVKQSPDLQRWYVLCKFLNGRLLNQLSGVIRSYIQFAGDIQRRAKANHNRLYMDNTQRVEYYSNVLEVVDFCIKGTSRFSNVFSDYFRDEDAYADYLDNYLQFKDEKIAEVSSFAALKTFCNEEEVKAGIYMDGENPVMQRNIVMAKLFGPDEVLKNVVPKVTREEIEEYYQLEKQIAPYRQNGYCKSEEDQKKLLRFQRIKNRVEFQTITEFSEIINELLGQLISWSFLRERDLLYFQLGFHYLCLHNDTEKPAEYKEISREDGTVIRNAILHQVAAMYVGGLPVYTLADKKLAAFEKGEADCKLSISKDTAGAGKKIKDFFRYSKYVLIKDRMLTDQNQKYTIYLAGLELFENTDEHDNITDVRKYVDHFKYYATSDENAMSILDLYSEIHDRFFTYDMKYQKNVANMLENILLRHFVLIRPEFFTGSKKVGEGKKITCKARAQIEIAENGMRSEDFTYKLSDGKKNISTCMIAARDQKYLNTVARLLYYPHEAKKSIVDTREKKNNKKTNRGDGTFNKQKGTARKEKDNGPREFNDTGFSNTPFAGFDPFRNS

SEQ ID NO: 838 - protein, 1334 aa, unknown
  Synthetic Sequence
MKISKVDHTRMAVAKGNQHRRDEISGILYKDPTKTGSIDFDERFKKLNCSAKILYHVFNGIAEGSNKYKNIVDKVNNNLDRVLFTGKSYDRKSIIDIDTVLRNVEKINAFDRISTEEREQIIDDLLEIQLRKGLRKGKAGLREVLLIGAGVIVRTDKKQEIADFLEILDEDFNKTNQAKNIKLSIENQGLVVSPVSRGEERIFDVSGAQKGKSSKKAQEKEALSAFLLDYADLDKNVRFEYLRKIRRLINLYFYVKNDDVMSLTEIPAEVNLEKDFDIWRDHEQRKEENGDFVGCPDILLADRDVKKSNSKQVKIAERQLRESIREKNIKRYRFSIKTIEKDDGTYFFANKQISVFWIHRIENAVERILGSINDKKLYRLRLGYLGEKVWKDILNFLSIKYIAVGKAVFNFAMDDLQEKDRDIEPGKISENAVNGLTSFDYEQIKADEMLQREVAVNVAFAANNLARVTVDIPQNGEKEDILLWNKSDIKKYKKNSKKGILKSILQFFGGASTWNMKMFEIAYHDQPGDYEENYLYDIIQIIYSLRNKSFHFKTYDHGDKNWNRELIGKMIEHDAERVISVEREKFHSNNLPMFYKDADLKKILDLLYSDYAGRASQVPAFNTVLVRKNFPEFLRKDMGYKVHFNNPEVENQWHSAVYYLYKEIYYNLFLRDKEVKNLFYTSLKNIRSEVSDKKQKLASDDFASRCEEIEDRSLPEICQIIMTEYNAQNFGNRKVKSQRVIEKNKDIFRHYKMLLIKTLAGAFSLYLKQERFAFIGKATPIPYETTDVKNFLPEWKSGMYASFVEEIKNNLDLQEWYIVGRFLNGRMLNQLAGSLRSYIQYAEDIERRAAENRNKLFSKPDEKIEACKKAVRVLDLCIKISTRISAEFTDYFDSEDDYADYLEKYLKYQDDAIKELSGSSYAALDHFCNKDDLKFDIYVNAGQKPILQRNIVMAKLFGPDNILSEVMEKVTESAIREYYDYLKKVSGYRVRGKCSTEKEQEDLLKFQRLKNAVEFRDVTEYAEVINELLGQLISWSYLRERDLLYFQLGFHYMCLKNKSFKPAEYVDIRRNNGTIIHNAILYQIVSMYINGLDFYSCDKEGKTLKPIETGKGVGSKIGQFIKYSQYLYNDPSYKLEIYNAGLEVFENIDEHDNITDLRKYVDHFKYYAYGNKMSLLDLYSEFFDRFFTYDMKYQKNVVNVLENILLRHFVIFYPKFGSGKKDVGIRDCKKERAQIEISEQSLTSEDFMFKLDDKAGEEAKKFPARDERYLQTIAKLLYYPNEIEDMNRFMKKGETINKKVQFNRKKKITRKQKNNSSNEVLSSTMGYLFKNIKL

SEQ ID NO: 839 - protein, 1175 aa, Carnobacterium gallinarum
MRITKVKIKLDNKLYQVTMQKEEKYGTLKLNEESRKSTAEILRLKKASFNKSFHSKTINSQKENKNATIKKNGDYISQIFEKLVGVDTNKNIRKPKMSLTDLKDLPKKDLALFIKRKFKNDDIVEIKNLDLISLFYNALQKVPGEHFTDESWADFCQEMMPYREYKNKFIERKIILLANSIEQNKGFSINPETFSKRKRVLHQWAIEVQERGDFSILDEKLSKLAEIYNFKKMCKRVQDELNDLEKSMKKGKNPEKEKEAYKKQKNFKIKTIWKDYPYKTHIGLIEKIKENEELNQFNIEIGKYFEHYFPIKKERCTEDEPYYLNSETIATTVNYQLKNALISYLMQIGKYKQFGLENQVLDSKKLQEIGIYEGFQTKFMDACVFATSSLKNIIEPMRSGDILGKREFKEAIATSSFVNYHHFFPYFPFELKGMKDRESELIPFGEQTEAKQMQNIWALRGSVQQIRNEIFHSFDKNQKFNLPQLDKSNFEFDASENSTGKSQSYIETDYKFLFEAEKNQLEQFFIERIKSSGALEYYPLKSLEKLFAKKEMKFSLGSQVVAFAPSYKKLVKKGHSYQTATEGTANYLGLSYYNRYELKEESFQAQYYLLKLIYQYVFLPNFSQGNSPAFRETVKAILRINKDEARKKMKKNKKFLRKYAFEQVREMEFKETPDQYMSYLQSEMREEKVRKAEKNDKGFEKNITMNFEKLLMQIFVKGFDVFLTTFAGKELLLSSEEKVIKETEISLSKKINEREKTLKASIQVEHQLVATNSAISYWLFCKLLDSRHLNELRNEMIKFKQSRIKFNHTQHAELIQNLLPIVELTILSNDYDEKNDSQNVDVSAYFEDKSLYETAPYVQTDDRTRVSFRPILKLEKYHTKSLIEALLKDNPQFRVAATDIQEWMHKREEIGELVEKRKNLHTEWAEGQQTLGAEKREEYRDYCKKIDRFNWKANKVTLTYLSQLHYLITDLLGRMVGFSALFERDLVYFSRSFSELGGETYHISDYKNLSGVLRLNAEVKPIKIKNIKVIDNEENPYKGNEPEVKPFLDRLHAYLENVIGIKAVHGKIRNQTAHLSVLQLELSMIESMNNLRDLMAYDRKLKNAVTKSMIKILDKHGMILKLKIDENHKNFEIESLIPKEIIHLKDKAIKTNQVSEEYCQLVLALLTTNPGNQLN

SEQ ID NO: 840 - protein, 1154 aa, Paludibacter propionicigenes
MRVSKVKVKDGGKDKMVLVHRKTTGAQLVYSGQPVSNETSNILPEKKRQSFDLSTLNKTIIKFDTAKKQKLNVDQYKIVEKIFKYPKQELPKQIKAEEILPFLNHKFQEPVKYWKNGKEESFNLTLLIVEAVQAQDKRKLQPYYDWKTWYIQTKSDLLKKSIENNRIDLTENLSKRKKALLAWETEFTASGSIDLTHYHKVYMTDVLCKMLQDVKPLTDDKGKINTNAYHRGLKKALQNHQPAIFGTREVPNEANRADNQLSIYHLEVVKYLEHYFPIKTSKRRNTADDIAHYLKAQTLKTTIEKQLVNAIRANIIQQGKTNHHELKADTTSNDLIRIKTNEAFVLNLTGTCAFAANNIRNMVDNEQTNDILGKGDFIKSLLKDNTNSQLYSFFFGEGLSTNKAEKETQLWGIRGAVQQIRNNVNHYKKDALKTVFNISNFENPTITDPKQQTNYADTIYKARFINELEKIPEAFAQQLKTGGAVSYYTIENLKSLLTTFQFSLCRSTIPFAPGFKKVFNGGINYQNAKQDESFYELMLEQYLRKENFAEESYNARYFMLKLIYNNLFLPGFTTDRKAFADSVGFVQMQNKKQAEKVNPRKKEAYAFEAVRPMTAADSIADYMAYVQSELMQEQNKKEEKVAEETRINFEKFVLQVFIKGFDSFLRAKEFDFVQMPQPQLTATASNQQKADKLNQLEASITADCKLTPQYAKADDATHIAFYVFCKLLDAAHLSNLRNELIKFRESVNEFKFHHLLEIIEICLLSADVVPTDYRDLYSSEADCLARLRPFIEQGADITNWSDLFVQSDKHSPVIHANIELSVKYGTTKLLEQIINKDTQFKTTEANFTAWNTAQKSIEQLIKQREDHHEQWVKAKNADDKEKQERKREKSNFAQKFIEKHGDDYLDICDYINTYNWLDNKMHFVHLNRLHGLTIELLGRMAGFVALFDRDFQFFDEQQIADEFKLHGFVNLHSIDKKLNEVPTKKIKEIYDIRNKIIQINGNKINESVRANLIQFISSKRNYYNNAFLHVSNDEIKEKQMYDIRNHIAHFNYLTKDAADFSLIDLINELRELLHYDRKLKNAVSKAFIDLFDKHGMILKLKLNADHKLKVESLEPKKIYHLGSSAKDKPEYQYCTNQVMMAYCNMCRSLLEMKK

SEQ ID NO: 841 - protein, 1120 aa, Listeria seeligeri
MWISIKTLIHHLGVLFFCDYMYNRREKKIIEVKTMRITKVEVDRKKVLISRDKNGGKLVYENEMQDNTEQIMHHKKSSFYKSVVNKTICRPEQKQMKKLVHGLLQENSQEKIKVSDVTKLNISNFLNHRFKKSLYYFPENSPDKSEEYRIEINLSQLLEDSLKKQQGTFICWESFSKDMELYINWAENYISSKTKLIKKSIRNNRIQSTESRSGQLMDRYMKDILNKNKPFDIQSVSEKYQLEKLTSALKATFKEAKKNDKEINYKLKSTLQNHERQIIEELKENSELNQFNIEIRKHLETYFPIKKTNRKVGDIRNLEIGEIQKIVNHRLKNKIVQRILQEGKLASYEIESTVNSNSLQKIKIEEAFALKFINACLFASNNLRNMVYPVCKKDILMIGEFKNSFKEIKHKKFIRQWSQFFSQEITVDDIELASWGLRGAIAPIRNEIIHLKKHSWKKFFNNPTFKVKKSKIINGKTKDVTSEFLYKETLFKDYFYSELDSVPELIINKMESSKILDYYSSDQLNQVFTIPNFELSLLTSAVPFAPSFKRVYLKGFDYQNQDEAQPDYNLKLNIYNEKAFNSEAFQAQYSLFKMVYYQVFLPQFTTNNDLFKSSVDFILTLNKERKGYAKAFQDIRKMNKDEKPSEYMSYIQSQLMLYQKKQEEKEKINHFEKFINQVFIKGFNSFIEKNRLTYICHPTKNTVPENDNIEIPFHTDMDDSNIAFWLMCKLLDAKQLSELRNEMIKFSCSLQSTEEISTFTKAREVIGLALLNGEKGCNDWKELFDDKEAWKKNMSLYVSEELLQSLPYTQEDGQTPVINRSIDLVKKYGTETILEKLFSSSDDYKVSAKDIAKLHEYDVTEKIAQQESLHKQWIEKPGLARDSAWTKKYQNVINDISNYQWAKTKVELTQVRHLHQLTIDLLSRLAGYMSIADRDFQFSSNYILERENSEYRVTSWILLSENKNKNKYNDYELYNLKNASIKVSSKNDPQLKVDLKQLRLTLEYLELFDNRLKEKRNNISHFNYLNGQLGNSILELFDDARDVLSYDRKLKNAVSKSLKEILSSHGMEVTFKPLYQTNHHLKIDKLQPKKIHHLGEKSTVSSNQVSNEYCQLVRTLLTMK

SEQ ID NO: 842 - protein, 1051 aa, Listeria newyorkensis
MKITKMRVDGRTIVMERTSKEGQLGYEGIDGNKTTEIIFDKKKESFYKSILNKTVRKPDEKEKNRRKQAINKAINKEITELMLAVLHQEVPSQKLHNLKSLNTESLTKLFKPKFQNMISYPPSKGAEHVQFCLTDIAVPAIRDLDEIKPDWGIFFEKLKPYTDWAESYIHYKQTTIQKSIEQNKIQSPDSPRKLVLQKYVTAFLNGEPLGLDLVAKKYKLADLAESFKLVDLNEDKSANYKIKACLQQHQRNILDELKEDPELNQYGIEVKKYIQRYFPIKRAPNRSKHARADFLKKELIESTVEQQFKNAVYHYVLEQGKMEAYELTDPKTKDLQDIRSGEAFSFKFINACAFASNNLKMILNPECEKDILGKGNFKKNLPNSTTRSDVVKKMIPFFSDELQNVNFDEAIWAIRGSIQQIRNEVYHCKKHSWKSILKIKGFEFEPNNMKYADSDMQKLMDKDIAKIPEFIEEKLKSSGVVRFYRHDELQSIWEMKQGFSLLTTNAPFVPSFKRVYAKGHDYQTSKNRYYNLDLTTFDILEYGEEDFRARYFLTKLVYYQQFMPWFTADNNAFRDAANFVLRLNKNRQQDAKAFINIREVEEGEMPRDYMGYVQGQIAIHEDSIEDTPNHFEKFISQVFIKGFDRHMRSANLKFIKNPRNQGLEQSEIEEMSFDIKVEPSFLKNKDDYIAFWIFCKMLDARHLSELRNEMIKYDGHLTGEQEIIGLALLGVDSRENDWKQFFSSEREYEKIMKGYVVEELYQREPYRQSDGKTPILFRGVEQARKYGTETVIQRLFDANPEFKVSKCNLAEWERQKETIEETIKRRKELHNEWAKNPKKPQNNAFFKEYKECCDAIDAYNWHKNKTTLAYVNELHHLLIEILGRYVGYVAIADRDFQCMANQYFKHSGITERVEYWGDNRLKSIKKLDTFLKKEGLFVSEKNARNHIAHLNYLSLKSECTLLYLSERLREIFKYDRKLKNAVSKSLIDILDRHGMSVVFANLKENKHRLVIKSLEPKKLRHLGGKKIDGGYIETNQVSEEYCGIVKRLLEM

SEQ ID NO: 843 - protein, 1182 aa, Leptotrichia wadei
MYMKITKIDGVSHYKKQDKGILKKKWKDLDERKQREKIEARYNKQIESKIYKEFFRLKNKKRIEKEEDQNIKSLYFFIKELYLNEKNEEWELKNINLEILDDKERVIKGYKFKEDVYFFKEGYKEYYLRILFNNLIEKVQNENREKVRKNKEFLDLKEIFKKYKNRKIDLLLKSINNNKINLEYKKENVNEEIYGINPTNDREMTFYELLKEIIEKKDEQKSILEEKLDNFDITNFLENIEKIFNEETEINIIKGKVLNELREYIKEKEENNSDNKLKQIYNLELKKYIENNFSYKKQKSKSKNGKNDYLYLNFLKKIMFIEEVDEKKEINKEKFKNKINSNFKNLFVQHILDYGKLLYYKENDEYIKNTGQLETKDLEYIKTKETLIRKMAVLVSFAANSYYNLFGRVSGDILGTEVVKSSKTNVIKVGSHIFKEKMLNYFFDFEIFDANKIVEILESISYSIYNVRNGVGHFNKLILGKYKKKDINTNKRIEEDLNNNEEIKGYFIKKRGEIERKVKEKFLSNNLQYYYSKEKIENYFEVYEFEILKRKIPFAPNFKRIIKKGEDLFNNKNNKKYEYFKNFDKNSAEEKKEFLKTRNFLLKELYYNNFYKEFLSKKEEFEKIVLEVKEEKKSRGNINNKKSGVSFQSIDDYDTKINISDYIASIHKKEMERVEKYNEEKQKDTAKYIRDFVEEIFLTGFINYLEKDKRLHFLKEEFSILCNNNNNVVDFNININEEKIKEFLKENDSKTLNLYLFFNMIDSKRISEFRNELVKYKQFTKKRLDEEKEFLGIKIELYETLIEFVILTREKLDTKKSEEIDAWLVDKLYVKDSNEYKEYEEILKLFVDEKILSSKEAPYYATDNKTPILLSNFEKTRKYGTQSFLSEIQSNYKYSKVEKENIEDYNKKEEIEQKKKSNIEKLQDLKVELHKKWEQNKITEKEIEKYNNTTRKINEYNYLKNKEELQNVYLLHEMLSDLLARNVAFFNKWERDFKFIVIAIKQFLRENDKEKVNEFLNPPDNSKGKKVYFSVSKYKNTVENIDGIHKNFMNLIFLNNKFMNRKIDKMNCAIWVYFRNYIAHFLHLHTKNEKISLISQMNLLIKLFSYDKKVQNHILKSTKTLLEKYNIQINFEISNDKNEVFKYKIKNRLYSKKGKMLGKNNKFEILENEFLENVKAMLEYSE

SEQ ID NO: 844 - protein, 1285 aa, Rhodobacter capsulatus
MQIGKVQGRTISEFGDPAGGLKRKISTDGKNRKELPAHLSSDPKALIGQWISGIDKIYRKPDSRKSDGKAIHSPTPSKMQFDARDDLGEAFWKLVSEAGLAQDSDYDQFKRRLHPYGDKFQPADSGAKLKFEADPPEPQAFHGRWYGAMSKRGNDAKELAAALYEHLHVDEKRIDGQPKRNPKTDKFAPGLVVARALGIESSVLPRGMARLARNWGEEEIQTYFVVDVAASVKEVAKAAVSAAQAFDPPRQVSGRSLSPKVGFALAEHLERVTGSKRCSFDPAAGPSVLALHDEVKKTYKRLCARGKNAARAFPADKTELLALMRHTHENRVRNQMVRMGRVSEYRGQQAGDLAQSHYWTSAGQTEIKESEIFVRLWVGAFALAGRSMKAWIDPMGKIVNTEKNDRDLTAAVNIRQVISNKEMVAEAMARRGIYFGETPELDRLGAEGNEGFVFALLRYLRGCRNQTFHLGARAGFLKEIRKELEKTRWGKAKEAEHVVLTDKTVAAIRAIIDNDAKALGARLLADLSGAFVAHYASKEHFSTLYSEIVKAVKDAPEVSSGLPRLKLLLKRADGVRGYVHGLRDTRKHAFATKLPPPPAPRELDDPATKARYIALLRLYDGPFRAYASGITGTALAGPAARAKEAATALAQSVNVTKAYSDVMEGRSSRLRPPNDGETLREYLSALTGETATEFRVQIGYESDSENARKQAEFIENYRRDMLAFMFEDYIRAKGFDWILKIEPGATAMTRAPVLPEPIDTRGQYEHWQAALYLVMHFVPASDVSNLLHQLRKWEALQGKYELVQDGDATDQADARREALDLVKRFRDVLVLFLKTGEARFEGRAAPFDLKPFRALFANPATFDRLFMATPTTARPAEDDPEGDGASEPELRVARTLRGLRQIARYNHMAVLSDLFAKHKVRDEEVARLAEIEDETQEKSQIVAAQELRTDLHDKVMKCHPKTISPEERQSYAAAIKTIEEHRFLVGRVYLGDHLRLHRLMMDVIGRLIDYAGAYERDTGTFLINASKQLGAGADWAVTIAGAANTDARTQTRKDLAHFNVLDRADGTPDLTALVNRAREMMAYDRKRKNAVPRSILDMLARLGLTLKWQMKDHLLQDATITQAAIKHLDKVRLTVGGPAAVTEARFSQDYLQMVAAVFNGSVQNPKPRRRDDGDAWHKPPKPATAQSQPDQKPPNKAPSAGSRLPPPQVGEVYEGVVVKVIDTGSLGFLAVEGVAGNIGLHISRLRRIREDAIIVGRRYRFRVEIYVPPKSNTSKLNAADLVRID

SEQ ID NO: 845 - protein, 1159 aa, Leptotrichia buccalis
MKVTKVGGISHKKYTSEGRLVKSESEENRTDERLSALLNMRLDMYIKNPSSTETKENQKRIGKLKKFFSNKMVYLKDNTLSLKNGKKENIDREYSETDILESDVRDKKNFAVLKKIYLNENVNSEELEVFRNDIKKKLNKINSLKYSFEKNKANYQKINENNIEKVEGKSKRNIIYDYYRESAKRDAYVSNVKEAFDKLYKEEDIAKLVLEIENLTKLEKYKIREFYHEIIGRKNDKENFAKIIYEEIQNVNNMKELIEKVPDMSELKKSQVFYKYYLDKEELNDKNIKYAFCHFVEIEMSQLLKNYVYKRLSNISNDKIKRIFEYQNLKKLIENKLLNKLDTYVRNCGKYNYYLQDGEIATSDFIARNRQNEAFLRNIIGVSSVAYFSLRNILETENENDITGRMRGKTVKNNKGEEKYVSGEVDKIYNENKKNEVKENLKMFYSYDFNMDNKNEIEDFFANIDEAISSIRHGIVHFNLELEGKDIFAFKNIAPSEISKKMFQNEINEKKLKLKIFRQLNSANVFRYLEKYKILNYLKRTRFEFVNKNIPFVPSFTKLYSRIDDLKNSLGIYWKTPKTNDDNKTKEIIDAQIYLLKNIYYGEFLNYFMSNNGNFFEISKEIIELNKNDKRNLKTGFYKLQKFEDIQEKIPKEYLANIQSLYMINAGNQDEEEKDTYIDFIQKIFLKGFMTYLANNGRLSLIYIGSDEETNTSLAEKKQEFDKFLKKYEQNNNIKIPYEINEFLREIKLGNILKYTERLNMFYLILKLLNHKELTNLKGSLEKYQSANKEEAFSDQLELINLLNLDNNRVTEDFELEADEIGKFLDFNGNKVKDNKELKKFDTNKIYFDGENIIKHRAFYNIKKYGMLNLLEKIADKAGYKISIEELKKYSNKKNEIEKNHKMQENLHRKYARPRKDEKFTDEDYESYKQAIENIEEYTHLKNKVEFNELNLLQGLLLRILHRLVGYTSIWERDLRFRLKGEFPENQYIEEIFNFENKKNVKYKGGQIVEKYIKFYKELHQNDEVKINKYSSANIKVLKQEKKDLYIRNYIAHFNYIPHAEISLLEVLENLRKLLSYDRKLKNAVMKSVVDILKEYGFVATFKIGADKKIGIQTLESEKIVHLKNLKKKKLMTDRNSEELCKLVKIMFEYKMEEKKSEN

SEQ ID NO: 846 - protein, 1389 aa, Leptotrichia shahii
MGNLFGHKRWYEVRDKKDFKIKRKVKVKRNYDGNKYILNINENNNKEKIDNNKFIRKYINYKKNDNILKEFTRKFHAGNILFKLKGKEGIIRIENNDDFLETEEVVLYIEAYGKSEKLKALGITKKKIIDEAIRQGITKDDKKIEIKRQENEEEIEIDIRDEYTNKTLNDCSIILRIIENDELETKKSIYEIFKNINMSLYKIIEKIIENETEKVFENRYYEEHLREKLLKDDKIDVILTNFMEIREKIKSNLEILGFVKFYLNVGGDKKKSKNKKMLVEKILNINVDLTVEDIADFVIKELEFWNITKRIEKVKKVNNEFLEKRRNRTYIKSYVLLDKHEKFKIERENKKDKIVKFFVENIKNNSIKEKIEKILAEFKIDELIKKLEKELKKGNCDTEIFGIFKKHYKVNFDSKKFSKKSDEEKELYKIIYRYLKGRIEKILVNEQKVRLKKMEKIEIEKILNESILSEKILKRVKQYTLEHIMYLGKLRHNDIDMTTVNTDDFSRLHAKEELDLELITFFASTNMELNKIFSRENINNDENIDFFGGDREKNYVLDKKILNSKIKIIRDLDFIDNKNNITNNFIRKFTKIGTNERNRILHAISKERDLQGTQDDYNKVINIIQNLKISDEEVSKALNLDVVFKDKKNIITKINDIKISEENNNDIKYLPSFSKVLPEILNLYRNNPKNEPFDTIETEKIVLNALIYVNKELYKKLILEDDLEENESKNIFLQELKKTLGNIDEIDENIIENYYKNAQISASKGNNKAIKKYQKKVIECYIGYLRKNYEELFDFSDFKMNIQEIKKQIKDINDNKTYERITVKTSDKTIVINDDFEYIISIFALLNSNAVINKIRNRFFATSVWLNTSEYQNIIDILDEIMQLNTLRNECITENWNLNLEEFIQKMKEIEKDFDDFKIQTKKEIFNNYYEDIKNNILTEFKDDINGCDVLEKKLEKIVIFDDETKFEIDKKSNILQDEQRKLSNINKKDLKKKVDQYIKDKDQEIKSKILCRIIFNSDFLKKYKKEIDNLIEDMESENENKFQEIYYPKERKNELYIYKKNLFLNIGNPNFDKIYGLISNDIKMADAKFLFNIDGKNIRKNKISEIDAILKNLNDKLNGYSKEYKEKYIKKLKENDDFFAKNIQNKNYKSFEKDYNRVSEYKKIRDLVEFNYLNKIESYLIDINWKLAIQMARFERDMHYIVNGLRELGIIKLSGYNTGISRAYPKRNGSDGFYTTTAYYKFFDEESYKKFEKICYGFGIDLSENSEINKPENESIRNYISHFYIVRNPFADYSIAEQIDRVSNLLSYSTRYNNSTYASVFEVFKKDVNLDYDELKKKFKLIGNNDILERLMKPKKVSVLELESYNSDYIKNLIIELLTKIENTNDTL

SEQ ID NO: 847 - RNA, 86 nt, Artificial Sequence
  Synthetic Sequence
ggaaccauucaaaacagcauagcaaguuaaaauaaggcuaguccguuaucaacuugaaaaaguggcaccgagucggugcuuuuuuu

SEQ ID NO: 848 - RNA, 67 nt, Artificial Sequence
  Synthetic Sequence
uagcaaguuaaaauaaggcuaguccguuaucaacuugaaaaaguggcaccgagucggugcuuuuuuu

SEQ ID NO: 849 - RNA, 88 nt, Streptococcus pyogenes
guuggaaccauucaaaacagcauagcaaguuaaaauaaggcuaguccguuaucaacuugaaaaaguggcaccgagucggugcuuuuuu

SEQ ID NO: 850 - RNA, 93 nt, Listeria innocua
auauuguuaguauucaaaauaacauagcaaguuaaaauaaggcuuuguccguuaucaacuuuuaauuaaguagcgcuguuucggcgcuuuuuu

SEQ ID NO: 851 - RNA, 104 nt, Streptococcus mutans
uguuggaaucauucgaaacaacacagcaaguuaaaauaaggcagugauuuuuaauccaguccguacacaacuugaaaaagugcgcaccgauucggugcuuuuuu

SEQ ID NO: 852 - RNA, 95 nt, Streptococcus thermophilus
uugugguuugaaaccauucgaaacaacacagcgaguuaaaauaaggcuuaguccguacucaacuugaaaagguggcaccgauucgguguuuuuuu

SEQ ID NO: 853 - RNA, 118 nt, Streptococcus thermophilus
uaauaauaguguaagggacgccuuacacaguuacuuaaaucuugcagaagcuacaaagauaaggcuucaugccgaaaucaacacccugucauuuuauggcaggguguuuucguuauuu

SEQ ID NO: 854 - RNA, 112 nt, Neisseria meningitidis
cauauugucgcacugcgaaaugagaaccguugcuacaauaaggccgucugaaaagaugugccgcaacgcucugccccuuaaagcuucugcuuuaaggggcaucguuuauuuc

SEQ ID NO: 855 - RNA, 110 nt, Pasteurella multocida
gcauauuguugcacugcgaaaugagagacguugcuacaauaaggcuucugaaaagaaugaccguaacgcucugccccuugugauucuuaauugcaaggggcaucguuuuu

SEQ ID NO: 856 - RNA, 115 nt, Mycoplasma mobile
uauuauguauuucgaaauacagauguacaguuaagaauacauaagaaugauacaucacuaaaaaaaggcuuuaugccguaacuacuacuuauuuucaaaauaaguaguuuuuuuu

SEQ ID NO: 857 - RNA, 26 nt, Artificial Sequence
  Synthetic Sequence
uagcaaguuaaaauaaggcuaguccg

SEQ ID NO: 858 - RNA, 36 nt, Streptococcus pyogenes
uuguuggaaccauucaaaacagcauagcaaguuaaa

SEQ ID NO: 859 - RNA, 36 nt, Streptococcus mutans
guguuggaaucauucgaaacaacacagcaaguuaaa

SEQ ID NO: 860 - RNA, 36 nt, Streptococcus thermophilus
gguuugaaaccauucgaaacaacacagcgaguuaaa

SEQ ID NO: 861 - RNA, 36 nt, Streptococcus thermophilus
cuuacacaguuacuuaaaucuugcagaagcuacaaa

SEQ ID NO: 862 - RNA, 36 nt, Listeria innocua
auauuguuaguauucaaaauaacauagcaaguuaaa

SEQ ID NO: 863 - RNA, 34 nt, Listeria innocua
auuguuaguauucaaaauaacauagcaaguuaaa

SEQ ID NO: 864 - RNA, 36 nt, Treponema denticola
auuuaagauccaucuuaaauuacacaacgaguucaa

SEQ ID NO: 865 - RNA, 36 nt, Neisseria meningitidis
auugucgcacugcgaaaugagaaccguugcuacaau

SEQ ID NO: 866 - RNA, 38 nt, Neisseria meningitidis
auauugucgcacugcgaaaugagaaccguugcuacaau

SEQ ID NO: 867 - RNA, 36 nt, Streptococcus gordonii; identical to SEQ ID NO: 861

SEQ ID NO: 868 - RNA, 36 nt, Bifidobacterium bifidum
augaucaaggucauugaccugacaggcauaaauuga

SEQ ID NO: 869 - RNA, 36 nt, Lactobacillus salivarius
gguuuugaccucauugauuuaacauucugaguugaa

SEQ ID NO: 870 - RNA, 37 nt, Francisella tularensis
guuucaguuguuagauuauuugguauguacuuguguu

SEQ ID NO: 871 - RNA, 37 nt, Francisella tularensis
auuacagagcauuaauuauuugguacauuuauaauuu

SEQ ID NO: 872 - RNA, 37 nt, Legionella pneumophila
auuucaggguaucgaaauuuagaugauuucuaauuua

SEQ ID NO: 873 - RNA, 36 nt, Nitratifractor salsuginis
uguaacaggguaggguuuuuugaggggucuuaaaau

SEQ ID NO: 874 - RNA, 36 nt, Butyrivibrio fibrisolvens
aguuucuaaucacuuaauuuuuucggaccuacuaaa

SEQ ID NO: 875 - RNA, 36 nt, Streptobacillus moniliformis
gauucacauuauucaaguuuacuacagauucuguau

SEQ ID NO: 876 - RNA, 36 nt, Mycoplasma mobile
aguuaagaauacauaagaaugauacaucacuaaaaa

SEQ ID NO: 877 - RNA, 44 nt, Capnocytophaga ochracea
auugugaauugcuuucaaauugugcgacaaaaguagguauaaua

SEQ ID NO: 878 - RNA, 36 nt, Acidovorax ebreus
auugcagcaacggcucucaccccggauaaccacaau

SEQ ID NO: 879 - RNA, 36 nt, Wolinella succinogenes
auagccgcugccuacucagccauuuagcgcagcgac

SEQ ID NO: 880 - RNA, 37 nt, Wolinella succinogenes
uuuguuaaagcuggaugggauuauuauagaguguugc

SEQ ID NO: 881 - RNA, 37 nt, Wolinella succinogenes
uuucaaggcaucgaacggauuugcuauaaaguguugc

SEQ ID NO: 882 - RNA, 36 nt, Prevotella ruminicola
uuuugcacacguaagauuccuacaucuuaucacaau

SEQ ID NO: 883 - RNA, 48 nt, Fibrobacter succinogenes
auugugaauugcuuucagauuaugaaaauaauauaguuaaaauuuuug

SEQ ID NO: 884 - RNA, 36 nt, Campylobacter jejuni
auuuuauuucgauuuuaaucaacccuaaauuucaau

SEQ ID NO: 885 - RNA, 36 nt, Campylobacter jejuni
auuuuagucccuuuuuaaauuucuuaugagauuaua

SEQ ID NO: 886 - RNA, 25 nt, Campylobacter jejuni
aagaaauuuaaaaagggacuaaaau

SEQ ID NO: 887 - RNA, 36 nt, Pasteurella multocida
auuguagcaacgucucucauuucgcagugcaacaau

SEQ ID NO: 888 - RNA, 36 nt, Rhodopseudomonas palustris
gccguggcuuuccuaccgauuucccaccgcaugauu

SEQ ID NO: 889 - RNA, 36 nt, Olsenella uli
ucugaauuaccagucagaacgauacugcgagucaaa

SEQ ID NO: 890 - RNA, 36 nt, Rhodospirillum rubrum
guuccauggccccgucccacacgccaugauagagcg

SEQ ID NO: 891 - RNA, 36 nt, Rhodospirillum rubrum
aaacgggagaaccgucccacacggccaugguagagu

SEQ ID NO: 892 - RNA, 36 nt, Dinoroseobacter shibae
uuaacggcucgaccgcgaauucugaacguaaagaca

SEQ ID NO: 893 - RNA, 36 nt, Verminephrobacter eiseniae
uuagcguccagagcgcauaucccagugagauauccg

SEQ ID NO: 894 - RNA, 75 nt, Streptococcus pyogenes
aaacagcauagcaaguuaaaauaaggcuaguccguuaucaacuugaaaaaguggcaccgagucggugcuuuuuuu

SEQ ID NO: 895 - RNA, 77 nt, Listeria innocua
aaauaacauagcaaguuaaaauaaggcuuuguccguuaucaacuuuuaauuaaguagcgcuguuucggcgcuuuuuu

SEQ ID NO: 896 - RNA, 73 nt, Artificial Sequence
  Synthetic Sequence
aacagcauagcaaguuaaaauaaggcuaguccguuaucaacuugaaaaaguggcaccgagucggugcuuuuuu

SEQ ID NO: 897 - RNA, 33 nt, Francisella novicida
uauaaauguaccaaauaauuaaugcucuguaau

SEQ ID NO: 898 - RNA, 74 nt, Campylobacter jejuni
aagaaauuuaaaaagggacuaaaauaaagaguuugcgggacucugcgggguuacaauccccuaaaaccgcuuuu

SEQ ID NO: 899 - RNA, 96 nt, Francisella novicida
aucuaaaauuauaaauguaccaaauaauuaaugcucuguaaucauuuaaaaguauuuugaacggaccucuguuugacacgucugaauaacuaaaaa

SEQ ID NO: 900 - RNA, 109 nt, Streptococcus thermophilus2
uguaagggacgccuuacacaguuacuuaaaucuugcagaagcuacaaagauaaggcuucaugccgaaaucaacacccugucauuuuauggcaggguguuuucguuauuu

SEQ ID NO: 901 - RNA, 110 nt, Mycoplasma mobile
uguauuucgaaauacagauguacaguuaagaauacauaagaaugauacaucacuaaaaaaaggcuuuaugccguaacuacuacuuauuuucaaaauaaguaguuuuuuuu

SEQ ID NO: 902 - RNA, 92 nt, Listeria innocua
auuguuaguauucaaaauaacauagcaaguuaaaauaaggcuuuguccguuaucaacuuuuaauuaaguagcgcuguuucggcgcuuuuuuu

SEQ ID NO: 903 - RNA, 89 nt, Streptococcus pyogenes
guuggaaccauucaaaacagcauagcaaguuaaaauaaggcuaguccguuaucaacuugaaaaaguggcaccgagucggugcuuuuuuu

SEQ ID NO: 904 - RNA, 107 nt, Streptococcus mutans
guuggaaucauucgaaacaacacagcaaguuaaaauaaggcagugauuuuuaauccaguccguacacaacuugaaaaagugcgcaccgauucggugcuuuuuuauuu

SEQ ID NO: 905 - RNA, 96 nt, Streptococcus thermophilus
uugugguuugaaaccauucgaaacaacacagcgaguuaaaauaaggcuuaguccguacucaacuugaaaagguggcaccgauucgguguuuuuuuu

SEQ ID NO: 906 - RNA, 102 nt, Neisseria meningitidis
acauauugucgcacugcgaaaugagaaccguugcuacaauaaggccgucugaaaagaugugccgcaacgcucugccccuuaaagcuucugcuuuaaggggca

SEQ ID NO: 907 - RNA, 110 nt, Pasteurella multocida; identical to SEQ ID NO: 855

SEQ ID NO: 908 - RNA, 37 nt, Francisella novicida
aacacaaguacauaccaaauaaucuaacaacugaaac

SEQ ID NO: 909 - RNA, 37 nt, Francisella novicida
aaauuauaaauguaccaaauaauuaaugcucuguaau

SEQ ID NO: 910 - RNA, 37 nt, Wolinella succinogenes; identical to SEQ ID NO: 881

SEQ ID NO: 911 - RNA, 37 nt, Wolinella succinogenes; identical to SEQ ID NO: 880

SEQ ID NO: 912 - RNA, 37 nt, gamma proteobacterium
auuucaguguauagaauguugggaugcauucugaaua

SEQ ID NO: 913 - RNA, 37 nt, gamma proteobacterium
auaacaagggaguauuugcuggaauaagcucugaaac

SEQ ID NO: 914 - RNA, 37 nt, Sutterella wadsworthensis
guuuccaagcaauagcucguggcguuaugauuucugu

SEQ ID NO: 915 - RNA, 37 nt, Sutterella wadsworthensis
ggugauuuccuauagcucauagcguuaugaucucuaa

SEQ ID NO: 916 - RNA, 37 nt, Legionella pneumophila; identical to SEQ ID NO: 872

SEQ ID NO: 917 - RNA, 36 nt, Listeria innocua; identical to SEQ ID NO: 862

SEQ ID NO: 918 - RNA, 36 nt, Streptococcus thermophilus; identical to SEQ ID NO: 860

SEQ ID NO: 919 - RNA, 36 nt, Streptococcus mutans; identical to SEQ ID NO: 859

SEQ ID NO: 920 - RNA, 36 nt, Streptococcus pyogenes; identical to SEQ ID NO: 858

SEQ ID NO: 921 - RNA, 36 nt, Fusobacterium nucleatum
auuuuuaauuuaaguaauaaaaaauggagcauauac

SEQ ID NO: 922 - RNA, 36 nt, Filifactor alocis
aguugacuaccauaugagauuacacuacacgguuca

SEQ ID NO: 923 - RNA, 36 nt, Treponema denticola; identical to SEQ ID NO: 864

SEQ ID NO: 924 - RNA, 36 nt, Solobacterium moorei
cuuauaccaguaagauaauuuacauaguaaguucaa

SEQ ID NO: 925 - RNA, 36 nt, Veillonella atypica
guuuuggagguuuacagaauuacacuacgaguucaa

SEQ ID NO: 926 - RNA, 36 nt, Finegoldia magna
guuuaauaccuauaugagauuacaucaugaguucaa

SEQ ID NO: 927 - RNA, 36 nt, Olsenella uli; identical to SEQ ID NO: 889

SEQ ID NO: 928 - RNA, 36 nt, Lactobacillus rhamnosus
caacuugaauugauugaucugacaucuacgaguuga

SEQ ID NO: 929 - RNA, 36 nt, Lactobacillus gasseri
ugauuagauuucauugaucuaacagccaucuaaaac

SEQ ID NO: 930 - RNA, 36 nt, Lactobacillus gasseri
acacuaaacuuuauugaucuaacaaccagauuuaaa

SEQ ID NO: 931 - RNA, 36 nt, Oenococcus kitaharae
ggguucuaccucauugaucugacacacagcauugaa

SEQ ID NO: 932 - RNA, 36 nt, Bifidobacterium bifidum; identical to SEQ ID NO: 868

SEQ ID NO: 933 - RNA, 36 nt, Staphylococcus pseudintermedius
guuuuacuucuuucuaaauaaacauaguuaaguuaa

SEQ ID NO: 934 - RNA, 36 nt, Eubacterium rectale
auuuuauagucacguaaauuuuucagaucuacuaaa

SEQ ID NO: 935 - RNA, 38 nt, Enterococcus faecalis
auuuuacugauaagaaauuauugagaaucuacaaaaau

SEQ ID NO: 936 - RNA, 36 nt, Streptococcus thermophilus; identical to SEQ ID NO: 861

SEQ ID NO: 937 - RNA, 36 nt, Staphylococcus lugdunensis
cuuguacuuauaccuaaaauuacagaaucuacugaa

SEQ ID NO: 938 - RNA, 36 nt, Eubacterium dolichum
aucauaaucuagcaaaaguuuauaugaucuaacaaa

SEQ ID NO: 939 - RNA, 36 nt, Mycoplasma mobile; identical to SEQ ID NO: 876

SEQ ID NO: 940 - RNA, 36 nt, Mycoplasma ovipneumoniae
auuuuacucuaguaagaaauugucgcacaaaaauaa

SEQ ID NO: 941 - RNA, 36 nt, Mycoplasma gallisepticum
auuauugcuuacacaauuauugucgugcuaaaauaa

SEQ ID NO: 942 - RNA, 36 nt, Mycoplasma canis
auuauuguuuacccaaauauuguacauccuaaauca

SEQ ID NO: 943 - RNA, 36 nt, Mycoplasma synoviae
uacuuacuuaacaaaauaauuguacgauuccaaaau

SEQ ID NO: 944 - RNA, 36 nt, Aminomonas paucivorans
gccuucccucccugccgaaggagcagauccucuccu

SEQ ID NO: 945 - RNA, 36 nt, Clostridium perfringens
uuauaguaacuaguuaaacucucgauaugcuauacc

SEQ ID NO: 946 - RNA, 36 nt, Clostridium cellulolyticum
auuauagcaacaauucaggcuccgauaugccauaau

SEQ ID NO: 947 - RNA, 36 nt, Acidovorax ebreus; identical to SEQ ID NO: 878

SEQ ID NO: 948 - RNA, 36 nt, Neisseria meningitidis; identical to SEQ ID NO: 865

SEQ ID NO: 949 - RNA, 36 nt, Pasteurella multocida
auuguugcacugcgaaaugagagacguugcuacaau

SEQ ID NO: 950 - RNA, 36 nt, phylotype Rs-D17
uuuguaacuuaucugagagaggaugguuauuauaau

SEQ ID NO: 951 - RNA, 36 nt, Wolinella succinogenes; identical to SEQ ID NO: 879

SEQ ID NO: 952 - RNA, 36 nt, Campylobacter jejuni
auaauacaaaaaucauuuuuuuaaacaaacauaaac

SEQ ID NO: 953 - RNA, 36 nt, Campylobacter jejuni
uauaaucucauaagaaauuuaaaaagggacuaaaau

SEQ ID NO: 954 - RNA, 36 nt, Helicobacter mustelae
guauuugucaauaaauauacuuuauaauggcaagau

SEQ ID NO: 955 - RNA, 36 nt, Roseburia intestinalis
uuguaauaaccuaauuaucacuugguaugauauaau

SEQ ID NO: 956 - RNA, 36 nt, Lactobacillus coryniformis
uuuuauucuauaguaaguuuucagcuaaaauagauc

SEQ ID NO: 957 - RNA, 36 nt, Rhodopseudomonas palustris; identical to SEQ ID NO: 888

SEQ ID NO: 958 - RNA, 36 nt, Cand. Puniceispirillum marinum
uaaccauaggcuccucaaucaccagaguguuauugc

SEQ ID NO: 959 - RNA, 36 nt, Verminephrobacter eiseniae; identical to SEQ ID NO: 893

SEQ ID NO: 960 - RNA, 36 nt, Ralstonia syzygii
guuaguagcaaagcgcaauucccgaucugcuggaaa

SEQ ID NO: 961 - RNA, 36 nt, Azospirillum B510
uuaacggcuggacccccgauccccaucgaauuucca

SEQ ID NO: 962 - RNA, 36 nt, Dinoroseobacter shibae; identical to SEQ ID NO: 892

SEQ ID NO: 963 - RNA, 36 nt, Rhodospirillum rubrum; identical to SEQ ID NO: 890

SEQ ID NO: 964 - RNA, 36 nt, Rhodospirillum rubrum; identical to SEQ ID NO: 891

SEQ ID NO: 965 - RNA, 36 nt, Spirochaeta Buddy
auuagagauaaucgcugguuuuuguuaagauauaac

SEQ ID NO: 966 - RNA, 36 nt, Prevotella ruminicola; identical to SEQ ID NO: 882

SEQ ID NO: 967 - RNA, 36 nt, Flavobacterium columnare
agauaaaauuauucuaaucuuuaaucuuaucacaau

SEQ ID NO: 968 - RNA, 36 nt, Parvibaculum lavamentivorans
cuugcgaaaagcgaccgccucucgauuugcuacaga

SEQ ID NO: 969 - RNA, 44 nt, Capnocytophaga ochracea; identical to SEQ ID NO: 877

SEQ ID NO: 970 - RNA, 48 nt, Fibrobacter succinogenes; identical to SEQ ID NO: 883

SEQ ID NO: 971 - RNA, 36 nt, Nitratifractor salsuginis; identical to SEQ ID NO: 873

SEQ ID NO: 972 - RNA, 36 nt, Akkermansia muciniphila
cuuauacgggaacuccacgauaaggcauuuuacaug

SEQ ID NO: 973 - RNA, 88 nt, Artificial Sequence
  Synthetic Sequence
uuggaaccauucaaaacagcauagcaaguuaaaauaaggcuaguccguuaucaacuugaaaaaguggcaccgagucggugcuuuuuuu

SEQ ID NO: 974 - RNA, 77 nt, Artificial Sequence
  Synthetic Sequence
caaaacagcauagcaaguuaaaauaaggcuaguccguuaucaacuugaaaaaguggcaccgagucggugcuuuuuuu

SEQ ID NO: 975 - RNA, 61 nt, Artificial Sequence
  Synthetic Sequence
caaaacagcauagcaaguuaaaauaaggcuaguccguuaucaacuugaaaaaguuuuuuuu

SEQ ID NO: 976 - RNA, 44 nt, Artificial Sequence
  Synthetic Sequence
caaaacagcauagcaaguuaaaauaaggcuaguccguuuuuuuu

SEQ ID NO: 977 - RNA, 72 nt, Artificial Sequence
  Synthetic Sequence
caaaacagcauagcaaguuaaaauaaggcuaguccgguucacugccguauaggcagcuaagaaauuuuuuuu

SEQ ID NO: 978 - RNA, 14 nt, Artificial Sequence
  Synthetic Sequence
uagcaaguuaaaau

SEQ ID NO: 979 - RNA, 102 nt, Artificial Sequence
  Synthetic Sequence
  misc_feature (1)..(80): n is a, c, g, or u
nnnnnnnnnnnnnnnnnnnnnnnnnnnnnnnnnnnnnnnnnnnnnnnnnnnnnnnnnnnnnnnnnnnnnnnnnnnnnnnnguuuuagagcuaugcuguuuug

SEQ ID NO: 980 - RNA, 102 nt, Artificial Sequence
  Synthetic Sequence
  misc_feature (1)..(80): n is a, c, g, or u
nnnnnnnnnnnnnnnnnnnnnnnnnnnnnnnnnnnnnnnnnnnnnnnnnnnnnnnnnnnnnnnnnnnnnnnnnnnnnnnnguuuuagagcuauguuauuuug

SEQ ID NO: 981 - RNA, 92 nt, exemplary
  misc_feature (1)..(80): n is a, c, g, or u
nnnnnnnnnnnnnnnnnnnnnnnnnnnnnnnnnnnnnnnnnnnnnnnnnnnnnnnnnnnnnnnnnnnnnnnnnnnnnnnnguuuuagagcua

SEQ ID NO: 982 - RNA, 152 nt, Artificial Sequence
  Synthetic Sequence
  misc_feature (37)..(116): n is a, c, g, or u
guuuuagagcuaugcuguuuugaauggucccaaaacnnnnnnnnnnnnnnnnnnnnnnnnnnnnnnnnnnnnnnnnnnnnnnnnnnnnnnnnnnnnnnnnnnnnnnnnnnnnnnnnguuuuagagcuaugcuguuuugaauggucccaaaac

SEQ ID NO: 983 - RNA, 188 nt, Artificial Sequence
  Synthetic Sequence
  misc_feature (37)..(116): n is a, c, g, or u
guuuuagagcuaugcuguuuugaauggucccaaaacnnnnnnnnnnnnnnnnnnnnnnnnnnnnnnnnnnnnnnnnnnnnnnnnnnnnnnnnnnnnnnnnnnnnnnnnnnnnnnnnguuuuagagcuaugcuguuuugaauggucccaaaacguuuuagagcuaugcuguuuugaauggucccaaaac

SEQ ID NO: 984 - RNA, 22 nt, exemplary
guuuuagagcuaugcuguuuug

SEQ ID NO: 985 - RNA, 36 nt, Streptococcus pyogenes
guuuuagagcuaugcuguuuugaauggucccaaaac

SEQ ID NO: 986 - RNA, 36 nt, Pasteurella multocida
guuguaguucccucucucauuucgcagugcuacaau

SEQ ID NO: 987 - RNA, 36 nt, Mycoplasma mobile
guuuugguguaguaucauucuuauguauucuuaaac

SEQ ID NO: 988 - RNA, 37 nt, Francisella novicida
guuucaguugcugaauuauuugguaaacuacuguuag

SEQ ID NO: 989 - RNA, 33 nt, Francisella novicida
guuucaguugcugaauuauuugguaaacuacug

SEQ ID NO: 990 - RNA, 36 nt, Streptococcus mutans
guuuuagagcuguguuguuucgaaugguuccaaaac

SEQ ID NO: 991 - RNA, 36 nt, Streptococcus thermophilus; identical to SEQ ID NO: 990

SEQ ID NO: 992 - RNA, 36 nt, Streptococcus thermophilus
guuuuuguacucucaagauuuaaguaacuguacaac

SEQ ID NO: 993 - RNA, 36 nt, Listeria innocua
guuuuagagcuauguuauuuugaaugcuaacaaaac

SEQ ID NO: 994 - RNA, 36 nt, Treponema denticola
guuugagaguuguguaauuuaagauggaucucaaac

SEQ ID NO: 995 - RNA, 36 nt, Neisseria meningitidis
guuguagcucccuuucucauuucgcagugcuacaau

SEQ ID NO: 996 - RNA, 36 nt, Streptococcus gordonii; identical to SEQ ID NO: 992

SEQ ID NO: 997 - RNA, 35 nt, Bifidobacterium bifidum
guuucaaugccugucagaucaaugacuuugaccac

SEQ ID NO: 998 - RNA, 36 nt, Lactobacillus salivarius
guuucagaaguauguuaaaucaauaagguuaagacc

SEQ ID NO: 999 - RNA, 37 nt, Francisella novicida
cuaacaguaguuuaccaaauaauucagcaacugaaac

SEQ ID NO: 1000 - RNA, 37 nt, Francisella novicida; identical to SEQ ID NO: 999

SEQ ID NO: 1001 - RNA, 37 nt, Legionella pneumophila
ccaauaaucccucaucuaaaaauccaaccacugaaac

SEQ ID NO: 1002 - RNA, 36 nt, Nitratifractor salsuginis
guuuuaagaccccucaaaaccccacccuguuacaau

SEQ ID NO: 1003 - RNA, 36 nt, Butyrivibrio fibrisolvens
guuuuaguacccgggaaaauuaagugauuggaaaac

SEQ ID NO: 1004 - RNA, 36 nt, Streptobacillus moniliformis
gauacagauucuugguaaauuugaauaaugugaaug

SEQ ID NO: 1005 - RNA, 36 nt, Mycoplasma mobile; identical to SEQ ID NO: 987

SEQ ID NO: 1006 - RNA, 44 nt, Capnocytophaga ochracea
uguuaucaaucgcaaaacuacaaaauuugaaagcaauucacaac

SEQ ID NO: 1007 - RNA, 36 nt, Acidovorax ebreus
aguguagcuauccggggugagagagggagcuacaac

SEQ ID NO: 1008 - RNA, 36 nt, Wolinella succinogenes
auuauagcgaggaauggcugaguaggcggcuauaac

SEQ ID NO: 1009 - RNA, 37 nt, Wolinella succinogenes
gcaacacuuuauagcaaauccgcuuagccugugaaac

SEQ ID NO: 1010 - RNA, 37 nt, Wolinella succinogenes; identical to SEQ ID NO: 1009

SEQ ID NO: 1011 - RNA, 36 nt, Prevotella ruminicola
guugugguuugauguaggaaaggaaugauauacaac

SEQ ID NO: 1012 - RNA, 48 nt, Fibrobacter succinogenes
guuguuauugcacuaguaaaacuagaaaaucugaaagcaauucacaac

SEQ ID NO: 1013 - RNA, 36 nt, Campylobacter jejuni
auuuuaccauaaagaaauuuaaaaagggacuaaaac

SEQ ID NO: 1014 - RNA, 36 nt, Campylobacter jejuni
guuuuagucccuuuuuaaauuucuuuaugguaaaau

SEQ ID NO: 1015 - RNA, 36 nt, Pasteurella multocida
auuguagcacugcgaaaugagagagggaacuacaac

SEQ ID NO: 1016 - RNA, 36 nt, Rhodopseudomonas palustris
agccuaccacggggaaaucgguagggaagccacggc

SEQ ID NO: 1017 - RNA, 36 nt, Olsenella uli
guuuuggggcagugucguuuugacugguaaucaaac

SEQ ID NO: 1018 - RNA, 36 nt, Rhodospirillum rubrum
acucuaccauggcggugugggacggggccauggaac

SEQ ID NO: 1019 - RNA, 36 nt, Rhodospirillum rubrum; identical to SEQ ID NO: 1018

SEQ ID NO: 1020 - RNA, 36 nt, Dinoroseobacter shibae
aguuuagcuguucagaauucgggguccagccgcaac

SEQ ID NO: 1021 - RNA, 36 nt, Verminephrobacter eiseniae
auuguagcucacugggauaugcgcacuggccggaac

SEQ ID NO: 1022 - RNA, 37 nt, Francisella novicida; identical to SEQ ID NO: 988

SEQ ID NO: 1023 - RNA, 37 nt, Francisella novicida; identical to SEQ ID NO: 988

SEQ ID NO: 1024 - RNA, 37 nt, Wolinella succinogenes; identical to SEQ ID NO: 1009

SEQ ID NO: 1025 - RNA, 37 nt, Wolinella succinogenes; identical to SEQ ID NO: 1009

SEQ ID NO: 1026 - RNA, 37 nt, gamma proteobacterium
guuucagagcuuaucccaacaaaccaacagcugaaac

SEQ ID NO: 1027 - RNA, 37 nt, gamma proteobacterium; identical to SEQ ID NO: 1026

SEQ ID NO: 1028 - RNA, 37 nt, Sutterella wadsworthensis
gcgaagaucauaacgcuacgagcuauagcacugaaac

SEQ ID NO: 1029 - RNA, 37 nt, Sutterella wadsworthensis; identical to SEQ ID NO: 1028

SEQ ID NO: 1030 - RNA, 37 nt, Legionella pneumophila; identical to SEQ ID NO: 1001

SEQ ID NO: 1031 - RNA, 36 nt, Listeria innocua; identical to SEQ ID NO: 993

SEQ ID NO: 1032 - RNA, 36 nt, Streptococcus thermophilus; identical to SEQ ID NO: 990

SEQ ID NO: 1033 - RNA, 36 nt, Streptococcus mutans; identical to SEQ ID NO: 990

SEQ ID NO: 1034 - RNA, 36 nt, Streptococcus pyogenes; identical to SEQ ID NO: 985

SEQ ID NO: 1035 - RNA, 36 nt, Fusobacterium nucleatum
guuugagaguaauguuauuuuaaauagauucaaaac

SEQ ID NO: 1036 - RNA, 36 nt, Filifactor alocis
guuugagaguaguguaauuucauaugguagucaaac

SEQ ID NO: 1037 - RNA, 36 nt, Treponema denticola; identical to SEQ ID NO: 994

SEQ ID NO: 1038 - RNA, 36 nt, Solobacterium moorei
guuugagaacuauguaaauuaugcugguagcaaaac

SEQ ID NO: 1039 - RNA, 36 nt, Veillonella atypica
guuugcgaguaguguaauucuguaaaucucuaaaac

SEQ ID NO: 1040 - RNA, 36 nt, Finegoldia magna
guuugagaaugauguaauuucauauagguauuaaac

SEQ ID NO: 1041 - RNA, 36 nt, Olsenella uli; identical to SEQ ID NO: 1017

SEQ ID NO: 1042 - RNA, 36 nt, Lactobacillus rhamnosus
gucucagguagaugucagaucaaucaguucaagagc

SEQ ID NO: 1043 - RNA, 36 nt, Lactobacillus gasseri
guuuuagaugguuguuagaucaauaagguuuagauc

SEQ ID NO: 1044 - RNA, 36 nt, Lactobacillus gasseri; identical to SEQ ID NO: 1043

SEQ ID NO: 1045 - RNA, 36 nt, Oenococcus kitaharae
gcuucagaugugugucagaucaaugagguagaaccc

SEQ ID NO: 1046 - RNA, 36 nt, Bifidobacterium bifidum
guuucagaugccugucagaucaaugacuuugaccac

SEQ ID NO: 1047 - RNA, 36 nt, Staphylococcus pseudintermedius
guuuuagcacuauguuuauuuagaaagagguaaaac

SEQ ID NO: 1048 - RNA, 36 nt, Eubacterium rectale
auuuuaguaacugaauaauuuacgugacuguaaaac

SEQ ID NO: 1049 - RNA, 36 nt, Enterococcus faecalis
guuuuuguauucucaauaauuucuuaucaguaaaac

SEQ ID NO: 1050 - RNA, 36 nt, Streptococcus thermophilus; identical to SEQ ID NO: 992

SEQ ID NO: 1051 - RNA, 36 nt, Staphylococcus lugdunensis
guuuuaguacucuguaauuuuagguauaagugauac

SEQ ID NO: 1052 - RNA, 36 nt, Eubacterium dolichum
guuuuguuaccauauggauuuuugcuagauuaagac

SEQ ID NO: 1053 - RNA, 36 nt, Mycoplasma mobile; identical to SEQ ID NO: 987

SEQ ID NO: 1054 - RNA, 36 nt, Mycoplasma ovipneumoniae
guuuuugugcuguacaauuucuuacuagaguaaaac

SEQ ID NO: 1055 - RNA, 36 nt, Mycoplasma gallisepticum
guuuuagcacuguacaauacuuguguaagcaauaac

SEQ ID NO: 1056 - RNA, 36 nt, Mycoplasma canis
guuuuaguguuguacaauauuuggguaaacaauaac

SEQ ID NO: 1057 - RNA, 36 nt, Mycoplasma synoviae
guuuugggguuguacaauuauuuuguuaaguaaaac

SEQ ID NO: 1058 - RNA, 36 nt, Aminomonas paucivorans
agcauagcauuucggagugcggcagggagcuaugac

SEQ ID NO: 1059 - RNA, 36 nt, Clostridium perfringens
auuauagcauaucgagaauuuacuaggaacuauaac

SEQ ID NO: 1060 - RNA, 36 nt, Clostridium cellulolyticum
auuauagcauaucggagccugaauuggagcuauaac

SEQ ID NO: 1061 - RNA, 36 nt, Acidovorax ebreus; identical to SEQ ID NO: 1007

SEQ ID NO: 1062 - RNA, 36 nt, Neisseria meningitidis; identical to SEQ ID NO: 995

SEQ ID NO: 1063 - RNA, 36 nt, Pasteurella multocida; identical to SEQ ID NO: 986

SEQ ID NO: 1064 - RNA, 36 nt, phylotype Rs-D17
guuauaguuuccuuccucucucagaugugcuauaau

SEQ ID NO: 1065 - RNA, 36 nt, Wolinella succinogenes; identical to SEQ ID NO: 1008

SEQ ID NO: 1066 - RNA, 36 nt, Campylobacter jejuni; identical to SEQ ID NO: 1014

SEQ ID NO: 1067 - RNA, 36 nt, Campylobacter jejuni; identical to SEQ ID NO: 1014

SEQ ID NO: 1068 - RNA, 36 nt, Helicobacter mustelae
auuuuagcauaaacauauuuaugaaguggcuaaaac

SEQ ID NO: 1069 - RNA, 36 nt, Roseburia intestinalis
auuauaccauaccaagugauaacagggaauuacaac

SEQ ID NO: 1070 - RNA, 36 nt, Lactobacillus coryniformis
gaucuauuuuagcugaaaacugaaggaaucaauagc

SEQ ID NO: 1071 - RNA, 36 nt, Rhodopseudomonas palustris; identical to SEQ ID NO: 1016

SEQ ID NO: 1072 - RNA, 36 nt, Cand. Puniceispirillum marinum
aguauagcacucuggugauugagagccuagagcaac

SEQ ID NO: 1073 - RNA, 36 nt, Verminephrobacter eiseniae; identical to SEQ ID NO: 1021

SEQ ID NO: 1074 - RNA, 36 nt, Ralstonia syzygii
agguuagcagaucgggaauugcgcucuggcuacaac

SEQ ID NO: 1075 - RNA, 36 nt, Azospirillum B510
aguguagccgauggggaucggggguccagccgcaac

SEQ ID NO: 1076 - RNA, 36 nt, Dinoroseobacter shibae; identical to SEQ ID NO: 1020

SEQ ID NO: 1077 - RNA, 36 nt, Rhodospirillum rubrum; identical to SEQ ID NO: 1018

SEQ ID NO: 1078 - RNA, 36 nt, Rhodospirillum rubrum; identical to SEQ ID NO: 1018

SEQ ID NO: 1079 - RNA, 36 nt, Spirochaeta Buddy
ggucaaucuuaacaaaaaucagcggucauccccaac

SEQ ID NO: 1080 - RNA, 36 nt, Prevotella ruminicola; identical to SEQ ID NO: 1011

SEQ ID NO: 1081 - RNA, 36 nt, Flavobacterium columnare
guugugguuugauuaaagauuagaaaacacgauauu

SEQ ID NO: 1082 - RNA, 36 nt, Parvibaculum lavamentivorans
agaguagcaaaucgagagacggccgcaauccgcagc

SEQ ID NO: 1083 - RNA, 44 nt, Capnocytophaga ochracea; identical to SEQ ID NO: 1006

SEQ ID NO: 1084 - RNA, 48 nt, Fibrobacter succinogenes; identical to SEQ ID NO: 1012

SEQ ID NO: 1085 - RNA, 36 nt, Nitratifractor salsuginis; identical to SEQ ID NO: 1002

SEQ ID NO: 1086 - RNA, 36 nt, Akkermansia muciniphila
guuguacugugccuuauuuuggauucaaggcaaaac

SEQ ID NO: 1087 - RNA, 44 nt, Artificial Sequence
  Synthetic Sequence
guuuuagagcuagaaauagcaaguuaaaauaaggcuaguccguu

SEQ ID NO: 1088 - RNA, 60 nt, Artificial Sequence
  Synthetic Sequence
  misc_feature (13)..(17): n is a, c, g, or u
guuuuagagcuannnnnuagcaaguuaaaauaaguuaaaauaaggcuaguccguuaucaa

SEQ ID NO: 1089 - RNA, 68 nt, Artificial Sequence
  Synthetic Sequence
guuuuagagcuaugcugaaaagcauagcaaguuaaaaauaaguuaaaauaaggcuaguccguuaucaa

SEQ ID NO: 1090 - RNA, 69 nt, Artificial Sequence
  Synthetic Sequence
guuuuagagcuaugcuguuuuggaaacaaaacagcauagcaaguuaaaauaaggcuaguccguuaucaa

SEQ ID NO: 1091 - RNA, 70 nt, Artificial Sequence
  Synthetic Sequence
guuuuagagcuaguuuuagagcuagaaauagcaaguuaaaauuagcaaguuaaaauaaggcuaguccguu

SEQ ID NO: 1092 - RNA, 70 nt, Artificial Sequence
  Synthetic Sequence
guuuuagagcuauagcaaguuaaaaugaaaguuuuagagcuauagcaaguuaaaauaaggcuaguccguu

SEQ ID NO: 1093 - RNA, 74 nt, Artificial Sequence
  Synthetic Sequence
guuuuagagcuagaaauagcaaguuaaaauguuuuagagcuagaaauagcaaguuaaaauaaggcuaguccguu

SEQ ID NO: 1094 - RNA, 119 nt, Artificial Sequence
  Synthetic Sequence
guuuuagagcuaugcuguuuuggaaacaaaacagcauagcaaguuaaaauguuuuagagcuaugcuguuuuggaaacaaaacagcauagcaaguuaaaauaaggcuaguccguuaucaa

SEQ ID NO: 1095 - RNA, 12 nt, Artificial Sequence
  Synthetic Sequence
guuuuagagcua

SEQ ID NO: 1096 - RNA, 19 nt, Artificial Sequence
  Synthetic Sequence
aauuucuacuguuguagau

SEQ ID NO: 1097 - RNA, 19 nt, Artificial Sequence
  Synthetic Sequence
aauuucugcuguugcagau

SEQ ID NO: 1098 - RNA, 19 nt, Artificial Sequence
  Synthetic Sequence
aauuuccacuguuguggau

SEQ ID NO: 1099 - RNA, 19 nt, Artificial Sequence
  Synthetic Sequence
aauuccuacuguuguaggu

SEQ ID NO: 1100 - RNA, 19 nt, Artificial Sequence
  Synthetic Sequence
aauuucuacuauuguagau

SEQ ID NO: 1101 - RNA, 19 nt, Artificial Sequence
  Synthetic Sequence
aauuucuacugcuguagau

SEQ ID NO: 1102 - RNA, 18 nt, Artificial Sequence
  Synthetic Sequence
aauuucuacuuuguagau

SEQ ID NO: 1103 - RNA, 17 nt, Artificial Sequence
  Synthetic Sequence
aauuucuacuuguagau

SEQ ID NO: 1104 - RNA, 67 nt, Artificial Sequence
  Synthetic Sequence
gaauuuuucaacgggugugccaauggccacuuuccagguggcaaagcccguugagcuucucaaaaag

SEQ ID NO: 1105 - RNA, 79 nt, Artificial Sequence
  Synthetic Sequence
gucuagaggacagaauuuuucaacgggugugccaauggccacuuuccagguggcaaagcccguugagcuucucaaaaag

SEQ ID NO: 1106 - RNA, 78 nt, Artificial Sequence
  Synthetic Sequence
ucuagaggacagaauuuuucaacgggugugccaauggccacuuuccagguggcaaagcccguugagcuucucaaaaag

SEQ ID NO: 1107 - RNA, 36 nt, Artificial Sequence
  Synthetic Sequence
acuuuccaggcaaagcccguugagcuucucaaaaag

SEQ ID NO: 1108 - RNA, 9 nt, Artificial Sequence
  Synthetic Sequence
agcuucuca

SEQ ID NO: 1109 - RNA, 8 nt, Artificial Sequence
  Synthetic Sequence
gcuucuca

SEQ ID NO: 1110 - RNA, 34 nt, Artificial Sequence
  Synthetic Sequence
  misc_feature (15)..(34): n is a, c, g, or u
cugagaaguggcacnnnnnnnnnnnnnnnnnnnn

SEQ ID NO: 1111 - RNA, 14 nt, Artificial Sequence
  Synthetic Sequence
cugagaaguggcac

SEQ ID NO: 1112 - RNA, 9 nt, Artificial Sequence
  Synthetic Sequence
cugagaagu

SEQ ID NO: 1113 - RNA, 13 nt, Artificial Sequence
  Synthetic Sequence
ugagaaguggcac

SEQ ID NO: 1114 - RNA, 8 nt, Artificial Sequence
  Synthetic Sequence
ugagaagu

SEQ ID NO: 1115 - protein, 7 aa, Artificial sequence
  Synthetic sequence
PKKKRKV

SEQ ID NO: 1116 - protein, 17 aa, Artificial sequence
  Synthetic sequence
RPAATKKAGQAKKKKLD

SEQ ID NO: 1117 - protein, 20 aa, Artificial sequence
  Synthetic sequence
AVKRPAATKKAGQAKKKKLD

SEQ ID NO: 1118 - protein, 18 aa, Artificial sequence
  Synthetic sequence
KRPAATKKAGQAKKKKLD

SEQ ID NO: 1119 - protein, 9 aa, Artificial sequence
  Synthetic sequence
PKKKRKVED

SEQ ID NO: 1120 - protein, 9 aa, Artificial sequence
  Synthetic sequence
PKKKRKVDT

SEQ ID NO: 1121 - protein, 8 aa, Artificial sequence
  Synthetic sequence
VSRKRPRP

SEQ ID NO: 1122 - protein, 10 aa, Artificial sequence
  Synthetic sequence
EGAPPAKRAR

SEQ ID NO: 1123 - protein, 6 aa, Artificial sequence
  Synthetic sequence
QRKRQK

SEQ ID NO: 1124 - protein, 6 aa, Artificial sequence
  Synthetic sequence
EEKRKR

SEQ ID NO: 1125 - protein, 28 aa, Artificial sequence
  Synthetic sequence
YRKCLQAGMNLEARKTKKKIKGIQQATA

SEQ ID NO: 1126 - protein, 28 aa, Artificial sequence
  Synthetic sequence
MSPKRIAKRRSPPADAIPKSKKVKVSHR

SEQ ID NO: 1127 - protein, 18 aa, Artificial sequence
  Synthetic sequence
MPKTRRRPRRSQRKRPPT

SEQ ID NO: 1128 - protein, 12 aa, Artificial sequence
  Synthetic sequence
RQARRNRRRRWR

SEQ ID NO: 1129 - protein, 9 aa, Artificial sequence
  Synthetic sequence
SKCLGWLWG

SEQ ID NO: 1130 - protein, 43 aa, Artificial sequence
  Synthetic sequence
VHSHKKKKIRTSPTFTTPKTLRLRRQPKYPRKSAPRRNKLDHY

SEQ ID NO: 1131 - protein, 38 aa, Artificial sequence
  Synthetic sequence
NQSSNFGPMKGGNFGGRSSGPYGGGGQYFAKPRNQGGY

SEQ ID NO: 1132 - protein, 61 aa, Artificial sequence
  Synthetic sequence
RSSINDKIIELKDLVMGTDAKMHKSGVLRKAIDYIKYLQQVNHKLRQENMVLKLANQKNKL

SEQ ID NO: 1133 - protein, 9 aa, Artificial sequence
  Synthetic sequence
PAAKRVKLD

SEQ ID NO: 1134 - protein, 17 aa, Artificial sequence
  Synthetic sequence
KRKGSQMVLLERKKLKA

SEQ ID NO: 1135 - protein, 17 aa, Artificial sequence
  Synthetic sequence
KRKNKKDLSTNQRALRR

SEQ ID NO: 1136 - protein, 17 aa, Artificial sequence
  Synthetic sequence
KRKTKKDISNNQRSLRR

SEQ ID NO: 1137 - protein, 17 aa, Artificial sequence
  Synthetic sequence
KRQHDNGNNHENSQKKR

SEQ ID NO: 1138 - protein, 17 aa, Artificial sequence
  Synthetic sequence
KKLTKKQLKAQQFRKSK

SEQ ID NO: 1139 - protein, 17 aa, Artificial sequence
  Synthetic sequence
KRHSQNDHSHSGRNKRR

SEQ ID NO: 1140 - protein, 17 aa, Artificial sequence
  Synthetic sequence
KKWCDEYFYITHRKETR

SEQ ID NO: 1141 - protein, 17 aa, Artificial sequence
  Synthetic sequence
KKNQEKSDQNETSKKRK

SEQ ID NO: 1142 - protein, 17 aa, Artificial sequence
  Synthetic sequence
RKKLQDAREYKIGKERK

SEQ ID NO: 1143 - protein, 17 aa, Artificial sequence
  Synthetic sequence
RKRDSENEEESEGTKKR

SEQ ID NO: 1144 - protein, 17 aa, Artificial sequence
  Synthetic sequence
KRPHDDDGSSEKKKKKK

SEQ ID NO: 1145 - protein, 17 aa, Artificial sequence
  Synthetic sequence
KRPQLGEIPNPMKKHKP

SEQ ID NO: 1146 - protein, 17 aa, Artificial sequence
  Synthetic sequence
RKDHLRASTIMQKRAEK

SEQ ID NO: 1147 - protein, 17 aa, Artificial sequence
  Synthetic sequence
KRKRGTSSGSEKKKIER

SEQ ID NO: 1148 - protein, 17 aa, Artificial sequence
  Synthetic sequence
KRNRNGKDANSQNRKKF

SEQ ID NO: 1149 - protein, 17 aa, Artificial sequence
  Synthetic sequence
RKGRPSTTCGHCKELRR

SEQ ID NO: 1150 - protein, 17 aa, Artificial sequence
  Synthetic sequence
KKLKMIMMSNKQKKLYK

SEQ ID NO: 1151 - protein, 17 aa, Artificial sequence
  Synthetic sequence
KKKHKKHKKHKKDKKKD

SEQ ID NO: 1152 - protein, 17 aa, Artificial sequence
  Synthetic sequence
KKKAQNRAAQKAFRERK

SEQ ID NO: 1153 - protein, 17 aa, Artificial sequence
  Synthetic sequence
RRAASSSGSVPPTLKKK

SEQ ID NO: 1154 - protein, 17 aa, Artificial sequence
  Synthetic sequence
KKNNNTRTSSVRSKRRR

SEQ ID NO: 1155 - protein, 17 aa, Artificial sequence
  Synthetic sequence
RKDFQNNSILRNSMKRK

SEQ ID NO: 1156 - protein, 17 aa, Artificial sequence
  Synthetic sequence
KKSVPPPRMMVTRSMKR

SEQ ID NO: 1157 - protein, 17 aa, Artificial sequence
  Synthetic sequence
RKEQLDKFEVKQKKRAG

SEQ ID NO: 1158 - protein, 17 aa, Artificial sequence
  Synthetic sequence
RRERRTARRKDERKQEK

SEQ ID NO: 1159 - protein, 17 aa, Artificial sequence
  Synthetic sequence
KRKNLDARHETVKRSKS

SEQ ID NO: 1160 - protein, 17 aa, Artificial sequence
  Synthetic sequence
KRPYNTRNYGHDDKKFK

SEQ ID NO: 1161 - protein, 17 aa, Artificial sequence
  Synthetic sequence
KKEKKEKKDKKEKKEKK

SEQ ID NO: 1162 - protein, 17 aa, Artificial sequence
  Synthetic sequence
KKRKLEDDDEEKKEKKE

SEQ ID NO: 1163 - protein, 17 aa, Artificial sequence
  Synthetic sequence
KKPSKEDSFSKYTRRRR

SEQ ID NO: 1164 - protein, 17 aa, Artificial sequence
  Synthetic sequence
RRLKKIKSKTYRKIKKK

SEQ ID NO: 1165 - protein, 17 aa, Artificial sequence
  Synthetic sequence
KRQLPTYEAASTRKYFK

SEQ ID NO: 1166 - protein, 17 aa, Artificial sequence
  Synthetic sequence
KRLSSQNVNYDLKRRKI

SEQ ID NO: 1167 - protein, 17 aa, Artificial sequence
  Synthetic sequence
KRFLLLFSFLKRNQKKK

SEQ ID NO: 1168 - protein, 17 aa, Artificial sequence
  Synthetic sequence
KKAGRGNAKGIQGRKIK

SEQ ID NO: 1169 - protein, 17 aa, Artificial sequence
  Synthetic sequence
RRRRDTQQVELRKAKRD

SEQ ID NO: 1170 - protein, 17 aa, Artificial sequence
  Synthetic sequence
KRDSPSENEEKPNKRFK

SEQ ID NO: 1171 - protein, 17 aa, Artificial sequence
  Synthetic sequence
KKDSKDKNEPLAKRTRH

SEQ ID NO: 1172 - protein, 17 aa, Artificial sequence
  Synthetic sequence
RKGGRKPSLTPPKNKRA

SEQ ID NO: 1173 - protein, 17 aa, Artificial sequence
  Synthetic sequence
RRLLAKDAMIAQRSKKI

SEQ ID NO: 1174 - protein, 17 aa, Artificial sequence
  Synthetic sequence
RKRLNLPSEISIIRKVR

SEQ ID NO: 1175 - protein, 17 aa, Artificial sequence
  Synthetic sequence
KKRKIKDPRSTKARKSK

SEQ ID NO: 1176 - protein, 17 aa, Artificial sequence
  Synthetic sequence
KRKRDDDEDSKDSKKAK

SEQ ID NO: 1177 - protein, 17 aa, Artificial sequence
  Synthetic sequence
KKPKLEEVDEEEEKKPK

SEQ ID NO: 1178 - protein, 16 aa, Artificial sequence
  Synthetic sequence
KRLDTPSRYLLRKARR

SEQ ID NO: 1179 - protein, 17 aa, Artificial sequence
  Synthetic sequence
KKRKAQPLKNPKKSLKR

SEQ ID NO: 1180 - protein, 17 aa, Artificial sequence
  Synthetic sequence
RKHKFDTSTWALPNKRR

SEQ ID NO: 1181 - protein, 17 aa, Artificial sequence
  Synthetic sequence
KRELSSSKKEEAKREKE

SEQ ID NO: 1182 - protein, 17 aa, Artificial sequence
  Synthetic sequence
KKLSTSLGGPSNGGKRK

SEQ ID NO: 1183 - protein, 17 aa, Artificial sequence
  Synthetic sequence
KKRKQAKLLLKEKNRKQ

SEQ ID NO: 1184 - protein, 17 aa, Artificial sequence
  Synthetic sequence
KRPISTIVEQELPKKFK

SEQ ID NO: 1185 - protein, 17 aa, Artificial sequence
  Synthetic sequence
KKEKEKEKKEKEKQKKK

SEQ ID NO: 1186 - protein, 17 aa, Artificial sequence
  Synthetic sequence
KKNNSERDKRTEKLKKI

SEQ ID NO: 1187 - protein, 17 aa, Artificial sequence
  Synthetic sequence
RKNDAEAKRLRMEERKR

SEQ ID NO: 1188 - protein, 17 aa, Artificial sequence
  Synthetic sequence
KRLRNLHIELNCKYKSK

SEQ ID NO: 1189 - protein, 17 aa, Artificial sequence
  Synthetic sequence
KKSTSVNVSDGKIKRRD

SEQ ID NO: 1190 - protein, 17 aa, Artificial sequence
  Synthetic sequence
RKFKKDEHIAKLKKIGR

SEQ ID NO: 1191 - protein, 17 aa, Artificial sequence
  Synthetic sequence
KKYDTKYLSGIAKRLNK

SEQ ID NO: 1192 - protein, 17 aa, Artificial sequence
  Synthetic sequence
KRKGSQMVFLERKKLKA

SEQ ID NO: 1193 - protein, 17 aa, Artificial sequence
  Synthetic sequence
KKDRLGDVLATAQRIRR

SEQ ID NO: 1194 - protein, 17 aa, Artificial sequence
  Synthetic sequence
RRKREFHNAVERRRREL

SEQ ID NO: 1195 - protein, 17 aa, Artificial sequence
  Synthetic sequence
RRKERSVSLFEIRTKEK

SEQ ID NO: 1196 - protein, 17 aa, Artificial sequence
  Synthetic sequence
KKVMPAIVVRQAKSWRR

SEQ ID NO: 1197 - protein, 17 aa, Artificial sequence
  Synthetic sequence
KKQNWSHMSRAQRAKLR

SEQ ID NO: 1198 - protein, 17 aa, Artificial sequence
  Synthetic sequence
RRSQGRIKANEFEKKFK

SEQ ID NO: 1199 - protein, 17 aa, Artificial sequence
  Synthetic sequence
KRSATGAKRAQFRKKRK

SEQ ID NO: 1200 - protein, 17 aa, Artificial sequence
  Synthetic sequence
RRSSSSSQISPEHRKKS

SEQ ID NO: 1201 - protein, 17 aa, Artificial sequence
  Synthetic sequence
KKPTSLKNKKDKQGKKK

SEQ ID NO: 1202 - protein, 17 aa, Artificial sequence
  Synthetic sequence
KKMLPQAERERIEREKR

SEQ ID NO: 1203 - protein, 17 aa, Artificial sequence
  Synthetic sequence
KKLYGDVSEVHERHRHR

SEQ ID NO: 1204 - protein, 17 aa, Artificial sequence
  Synthetic sequence
KKKQGNHDRLGGYQRKK

SEQ ID NO: 1205 - protein, 17 aa, Artificial sequence
  Synthetic sequence
RRGTYYMMQSRLRRERR

SEQ ID NO: 1206 - protein, 17 aa, Artificial sequence
  Synthetic sequence
KRQREYYLMEQLKGIKR

SEQ ID NO: 1207 - protein, 17 aa, Artificial sequence
  Synthetic sequence
RKTSELNRRKMLRKQKI

SEQ ID NO: 1208 - protein, 17 aa, Artificial sequence
  Synthetic sequence
RKNIQNQSSRIATKIKR

SEQ ID NO: 1209 - protein, 17 aa, Artificial sequence
  Synthetic sequence
KKDAILNKAVTLKSGKK

SEQ ID NO: 1210 - protein, 17 aa, Artificial sequence
  Synthetic sequence
KKHTESTASGIIKSIKK

SEQ ID NO: 1211 - protein, 17 aa, Artificial sequence
  Synthetic sequence
KKLRKHARSREKRKHEK

SEQ ID NO: 1212 - protein, 17 aa, Artificial sequence
  Synthetic sequence
KKPAAKKTSTSVDGKKR

SEQ ID NO: 1213 - protein, 17 aa, Artificial sequence
  Synthetic sequence
KRVTIQKKDIKLARRLR

SEQ ID NO: 1214 - protein, 17 aa, Artificial sequence
  Synthetic sequence
RKKASHACDQCRRKRIK

SEQ ID NO: 1215 - protein, 17 aa, Artificial sequence
  Synthetic sequence
KRRMVSDLPPPSKKKAL

SEQ ID NO: 1216 - protein, 17 aa, Artificial sequence
  Synthetic sequence
KRENNESRIVVLKYSKK

SEQ ID NO: 1217 - protein, 17 aa, Artificial sequence
  Synthetic sequence
RRAYLHYIPKYNRYEKR

SEQ ID NO: 1218 - protein, 17 aa, Artificial sequence
  Synthetic sequence
KKIKSLNAKQWKINKKR

SEQ ID NO: 1219 - protein, 17 aa, Artificial sequence
  Synthetic sequence
KKKHKKDKKKAKKAKKA

SEQ ID NO: 1220 - protein, 17 aa, Artificial sequence
  Synthetic sequence
KKDEKDTISSKKKRKLD

SEQ ID NO: 1221 - protein, 17 aa, Artificial sequence
  Synthetic sequence
KKKTSKKVHKDRSKKSK

SEQ ID NO: 1222 - protein, 17 aa, Artificial sequence
  Synthetic sequence
RRSKNSSTNTNADTKKR

SEQ ID NO: 1223 - protein, 17 aa, Artificial sequence
  Synthetic sequence
KRLKLEESDKMIEKGKK

SEQ ID NO: 1224 - protein, 17 aa, Artificial sequence
  Synthetic sequence
RKKGIRKFTPSMQRRLK

SEQ ID NO: 1225 - protein, 17 aa, Artificial sequence
  Synthetic sequence
KKRTTRRKKDPNAPKRR

SEQ ID NO: 1226 - protein, 17 aa, Artificial sequence
  Synthetic sequence
KKHYNNSKARRERKSGK

SEQ ID NO: 1227 - protein, 17 aa, Artificial sequence
  Synthetic sequence
RKTTARKKKKKTSTKKK

SEQ ID NO: 1228 - protein, 17 aa, Artificial sequence
  Synthetic sequence
KKGNDETYNLDIKKVLK

SEQ ID NO: 1229 - protein, 17 aa, Artificial sequence
  Synthetic sequence
KKMVSISDLKSKLSKRR

SEQ ID NO: 1230 - protein, 17 aa, Artificial sequence
  Synthetic sequence
KKNNDLILEMNKLKKKS

SEQ ID NO: 1231 - protein, 17 aa, Artificial sequence
  Synthetic sequence
RREEALNNKGNGKSVKK

SEQ ID NO: 1232 - protein, 17 aa, Artificial sequence
  Synthetic sequence
KRLSGIMRSQQEHHRRK

SEQ ID NO: 1233 - protein, 17 aa, Artificial sequence
  Synthetic sequence
KRRNPTRHEYNSRGKRL

SEQ ID NO: 1234 - protein, 17 aa, Artificial sequence
  Synthetic sequence
KRNRELKRKEEARLSKK

SEQ ID NO: 1235 - protein, 17 aa, Artificial sequence
  Synthetic sequence
KKDYEFDQSTTSFDKKK

SEQ ID NO: 1236 - protein, 17 aa, Artificial sequence
  Synthetic sequence
KKLMFFVVKKFDKIRDK

SEQ ID NO: 1237 - protein, 17 aa, Artificial sequence
  Synthetic sequence
KRLSERKAEKAEIRKRR

SEQ ID NO: 1238 - protein, 17 aa, Artificial sequence
  Synthetic sequence
KKPRVVLNERKRRRRRA

SEQ ID NO: 1239 - protein, 17 aa, Artificial sequence
  Synthetic sequence
KKLGEFLNLLKAVVKRK

SEQ ID NO: 1240 - protein, 17 aa, Artificial sequence
  Synthetic sequence
KREIYRISFQLSKIRRA

SEQ ID NO: 1241 - protein, 17 aa, Artificial sequence
  Synthetic sequence
KKKLMPKSALLIRKYQK

SEQ ID NO: 1242 - protein, 17 aa, Artificial sequence
  Synthetic sequence
KKTHLLDATDIFRKLGR

SEQ ID NO: 1243 - protein, 17 aa, Artificial sequence
  Synthetic sequence
RRVIAETFAKSSRNKSK

SEQ ID NO: 1244 - protein, 17 aa, Artificial sequence
  Synthetic sequence
KRRHERYDQEERLRKQR

SEQ ID NO: 1245 - protein, 17 aa, Artificial sequence
  Synthetic sequence
RKSDEPVSVKPSKKKSK

SEQ ID NO: 1246 - protein, 17 aa, Artificial sequence
  Synthetic sequence
RKHSLISSLQARKSKSK

SEQ ID NO: 1247 - protein, 17 aa, Artificial sequence
  Synthetic sequence
RRGSSNTSGSGGKRNSK

SEQ ID NO: 1248 - protein, 17 aa, Artificial sequence
  Synthetic sequence
KKELKRREKQALLEKKK

SEQ ID NO: 1249 - protein, 17 aa, Artificial sequence
  Synthetic sequence
KRPSKETPTSENKRSKG

SEQ ID NO: 1250 - protein, 17 aa, Artificial sequence
  Synthetic sequence
KRDNFRFLEDAIKQLKK

SEQ ID NO: 1251 - protein, 17 aa, Artificial sequence
  Synthetic sequence
RRQLIDKEKLQLKQKEK

SEQ ID NO: 1252 - protein, 17 aa, Artificial sequence
  Synthetic sequence
KKKGVGKNVGVGKKVQK

SEQ ID NO: 1253 - protein, 17 aa, Artificial sequence
  Synthetic sequence
RKRMRAVARLEKIKKKA

SEQ ID NO: 1254 - protein, 17 aa, Artificial sequence
  Synthetic sequence
KRLSDTIVPPRSKRSQR

SEQ ID NO: 1255 - protein, 17 aa, Artificial sequence
  Synthetic sequence
KKAKKDFYRFQVRERKK

SEQ ID NO: 1256 - protein, 17 aa, Artificial sequence
  Synthetic sequence
RRTSKRHSREFSSSRKR

SEQ ID NO: 1257 - protein, 17 aa, Artificial sequence
  Synthetic sequence
KKTKTNASKAEHIEKKK

SEQ ID NO: 1258 - protein, 17 aa, Artificial sequence
  Synthetic sequence
KKKDRTDISKLCDKKER

SEQ ID NO: 1259 - protein, 17 aa, Artificial sequence
  Synthetic sequence
KRDHKKQDFDAAKAKVR

SEQ ID NO: 1260 - protein, 17 aa, Artificial sequence
  Synthetic sequence
KKRIINGESKSSTKKGK

SEQ ID NO: 1261 - protein, 17 aa, Artificial sequence
  Synthetic sequence
KKYSKKTTSRPKREKRQ

SEQ ID NO: 1262 - protein, 17 aa, Artificial sequence
  Synthetic sequence
KKTVNYKQLLIDKNKKR

SEQ ID NO: 1263 - protein, 17 aa, Artificial sequence
  Synthetic sequence
KKPRLRLVCLQCKKIKR

SEQ ID NO: 1264 - protein, 17 aa, Artificial sequence
  Synthetic sequence
KKNDNKSKGAQKRKNAK

SEQ ID NO: 1265 - protein, 17 aa, Artificial sequence
  Synthetic sequence
KRPTSVVFIVPGSNKKK

SEQ ID NO: 1266 - protein, 17 aa, Artificial sequence
  Synthetic sequence
KKDDKAMEPPNEKPHRK

SEQ ID NO: 1267 - protein, 17 aa, Artificial sequence
  Synthetic sequence
KKVLLKEKAEAAKAKAK

SEQ ID NO: 1268 - protein, 17 aa, Artificial sequence
  Synthetic sequence
KRNKDNRNSRVKKRKKY

SEQ ID NO: 1269 - protein, 17 aa, Artificial sequence
  Synthetic sequence
KKNTRKGGKVYGKHKKK

SEQ ID NO: 1270 - protein, 17 aa, Artificial sequence
  Synthetic sequence
KKKKKSKNGTISKTGKK

SEQ ID NO: 1271 - protein, 17 aa, Artificial sequence
  Synthetic sequence
KKKAENKDIKKKKNSKK

SEQ ID NO: 1272 - protein, 17 aa, Artificial sequence
  Synthetic sequence
KKKKSKKSKKSKKSKKS

SEQ ID NO: 1273 - protein, 1368 aa, Streptococcus pyogenes [sequence omitted]

SEQ ID NO: 1274 - protein, 1368 aa, Artificial sequence
  Synthetic sequence
MDKKYSIGLAIGTNSVGWAVITDEYKVPSKKFKVLGNTDRHSIKKNLIGALLFDSGETAEATRLKRTARRRYTRRKNRICYLQEIFSNEMAKVDDSFFHRLEESFLVEEDKKHERHPIFGNIVDEVAYHEKYPTIYHLRKKLVDSTDKADLRLIYLALAHMIKFRGHFLIEGDLNPDNSDVDKLFIQLVQTYNQLFEENPINASGVDAKAILSARLSKSRRLENLIAQLPGEKKNGLFGNLIALSLGLTPNFKSNFDLAEDAKLQLSKDTYDDDLDNLLAQIGDQYADLFLAAKNLSDAILLSDILRVNTEITKAPLSASMIKRYDEHHQDLTLLKALVRQQLPEKYKEIFFDQSKNGYAGYIDGGASQEEFYKFIKPILEKMDGTEELLVKLNREDLLRKQRTFDNGSIPHQIHLGELHAILRRQEDFYPFLKDNREKIEKILTFRIPYYVGPLARGNSRFAWMTRKSEETITPWNFEEVVDKGASAQSFIERMTNFDKNLPNEKVLPKHSLLYEYFTVYNELTKVKYVTEGMRKPAFLSGEQKKAIVDLLFKTNRKVTVKQLKEDYFKKIECFDSVEISGVEDRFNASLGTYHDLLKIIKDKDFLDNEENEDILEDIVLTLTLFEDREMIEERLKTYAHLFDDKVMKQLKRRRYTGWGRLSRKLINGIRDKQSGKTILDFLKSDGFANRNFMQLIHDDSLTFKEDIQKAQVSGQGDSLHEHIANLAGSPAIKKGILQTVKVVDELVKVMGRHKPENIVIEMARENQTTQKGQKNSRERMKRIEEGIKELGSQILKEHPVENTQLQNEKLYLYYLQNGRDMYVDQELDINRLSDYDVDHIVPQSFLKDDSIDNKVLTRSDKNRGKSDNVPSEEVVKKMKNYWRQLLNAKLITQRKFDNLTKAERGGLSELDKAGFIKRQLVETRQITKHVAQILDSRMNTKYDENDKLIREVKVITLKSKLVSDFRKDFQFYKVREINNYHHAHDAYLNAVVGTALIKKYPKLESEFVYGDYKVYDVRKMIAKSEQEIGKATAKYFFYSNIMNFFKTEITLANGEIRKRPLIETNGETGEIVWDKGRDFATVRKVLSMPQVNIVKKTEVQTGGFSKESILPKRNSDKLIARKKDWDPKKYGGFDSPTVAYSVLVVAKVEKGKSKKLKSVKELLGITIMERSSFEKNPIDFLEAKGYKEVKKDLIIKLPKYSLFELENGRKRMLASAGELQKGNELALPSKYVNFLYLASHYEKLKGSPEDNEQKQLFVEQHKHYLDEIIEQISEFSKRVILADANLDKVLSAYNKHRDKPIREQAENIIHLFTLTNLGAPAAFKYFDTTIDRKRYTSTKEVLDATLIHQSITGLYETRIDLSQLGGD

SEQ ID NO: 1275 - protein, 1368 aa, Artificial sequence
  Synthetic sequence
MDKKYSIGLDIGTNSVGWAVITDEYKVPSKKFKVLGNTDRHSIKKNLIGALLFDSGETAEATRLKRTARRRYTRRKNRICYLQEIFSNEMAKVDDSFFHRLEESFLVEEDKKHERHPIFGNIVDEVAYHEKYPTIYHLRKKLVDSTDKADLRLIYLALAHMIKFRGHFLIEGDLNPDNSDVDKLFIQLVQTYNQLFEENPINASGVDAKAILSARLSKSRRLENLIAQLPGEKKNGLFGNLIALSLGLTPNFKSNFDLAEDAKLQLSKDTYDDDLDNLLAQIGDQYADLFLAAKNLSDAILLSDILRVNTEITKAPLSASMIKRYDEHHQDLTLLKALVRQQLPEKYKEIFFDQSKNGYAGYIDGGASQEEFYKFIKPILEKMDGTEELLVKLNREDLLRKQRTFDNGSIPHQIHLGELHAILRRQEDFYPFLKDNREKIEKILTFRIPYYVGPLARGNSRFAWMTRKSEETITPWNFEEVVDKGASAQSFIERMTNFDKNLPNEKVLPKHSLLYEYFTVYNELTKVKYVTEGMRKPAFLSGEQKKAIVDLLFKTNRKVTVKQLKEDYFKKIECFDSVEISGVEDRFNASLGTYHDLLKIIKDKDFLDNEENEDILEDIVLTLTLFEDREMIEERLKTYAHLFDDKVMKQLKRRRYTGWGRLSRKLINGIRDKQSGKTILDFLKSDGFANRNFMQLIHDDSLTFKEDIQKAQVSGQGDSLHEHIANLAGSPAIKKGILQTVKVVDELVKVMGRHKPENIVIEMARENQTTQKGQKNSRERMKRIEEGIKELGSQILKEHPVENTQLQNEKLYLYYLQNGRDMYVDQELDINRLSDYDVDAIVPQSFLKDDSIDNKVLTRSDKNRGKSDNVPSEEVVKKMKNYWRQLLNAKLITQRKFDNLTKAERGGLSELDKAGFIKRQLVETRQITKHVAQILDSRMNTKYDENDKLIREVKVITLKSKLVSDFRKDFQFYKVREINNYHHAHDAYLNAVVGTALIKKYPKLESEFVYGDYKVYDVRKMIAKSEQEIGKATAKYFFYSNIMNFFKTEITLANGEIRKRPLIETNGETGEIVWDKGRDFATVRKVLSMPQVNIVKKTEVQTGGFSKESILPKRNSDKLIARKKDWDPKKYGGFDSPTVAYSVLVVAKVEKGKSKKLKSVKELLGITIMERSSFEKNPIDFLEAKGYKEVKKDLIIKLPKYSLFELENGRKRMLASAGELQKGNELALPSKYVNFLYLASHYEKLKGSPEDNEQKQLFVEQHKHYLDEIIEQISEFSKRVILADANLDKVLSAYNKHRDKPIREQAENIIHLFTLTNLGAPAAFKYFDTTIDRKRYTSTKEVLDATLIHQSITGLYETRIDLSQLGGD

SEQ ID NO: 1276 - protein, 1368 aa, Artificial sequence
  Synthetic sequence
MDKKYSIGLAIGTNSVGWAVITDEYKVPSKKFKVLGNTDRHSIKKNLIGALLFDSGETAEATRLKRTARRRYTRRKNRICYLQEIFSNEMAKVDDSFFHRLEESFLVEEDKKHERHPIFGNIVDEVAYHEKYPTIYHLRKKLVDSTDKADLRLIYLALAHMIKFRGHFLIEGDLNPDNSDVDKLFIQLVQTYNQLFEENPINASGVDAKAILSARLSKSRRLENLIAQLPGEKKNGLFGNLIALSLGLTPNFKSNFDLAEDAKLQLSKDTYDDDLDNLLAQIGDQYADLFLAAKNLSDAILLSDILRVNTEITKAPLSASMIKRYDEHHQDLTLLKALVRQQLPEKYKEIFFDQSKNGYAGYIDGGASQEEFYKFIKPILEKMDGTEELLVKLNREDLLRKQRTFDNGSIPHQIHLGELHAILRRQEDFYPFLKDNREKIEKILTFRIPYYVGPLARGNSRFAWMTRKSEETITPWNFEEVVDKGASAQSFIERMTNFDKNLPNEKVLPKHSLLYEYFTVYNELTKVKYVTEGMRKPAFLSGEQKKAIVDLLFKTNRKVTVKQLKEDYFKKIECFDSVEISGVEDRFNASLGTYHDLLKIIKDKDFLDNEENEDILEDIVLTLTLFEDREMIEERLKTYAHLFDDKVMKQLKRRRYTGWGRLSRKLINGIRDKQSGKTILDFLKSDGFANRNFMQLIHDDSLTFKEDIQKAQVSGQGDSLHEHIANLAGSPAIKKGILQTVKVVDELVKVMGRHKPENIVIEMARENQTTQKGQKNSRERMKRIEEGIKELGSQILKEHPVENTQLQNEKLYLYYLQNGRDMYVDQELDINRLSDYDVDAIVPQSFLKDDSIDNKVLTRSDKNRGKSDNVPSEEVVKKMKNYWRQLLNAKLITQRKFDNLTKAERGGLSELDKAGFIKRQLVETRQITKHVAQILDSRMNTKYDENDKLIREVKVITLKSKLVSDFRKDFQFYKVREINNYHHAHDAYLNAVVGTALIKKYPKLESEFVYGDYKVYDVRKMIAKSEQEIGKATAKYFFYSNIMNFFKTEITLANGEIRKRPLIETNGETGEIVWDKGRDFATVRKVLSMPQVNIVKKTEVQTGGFSKESILPKRNSDKLIARKKDWDPKKYGGFDSPTVAYSVLVVAKVEKGKSKKLKSVKELLGITIMERSSFEKNPIDFLEAKGYKEVKKDLIIKLPKYSLFELENGRKRMLASAGELQKGNELALPSKYVNFLYLASHYEKLKGSPEDNEQKQLFVEQHKHYLDEIIEQISEFSKRVILADANLDKVLSAYNKHRDKPIREQAENIIHLFTLTNLGAPAAFKYFDTTIDRKRYTSTKEVLDATLIHQSITGLYETRIDLSQLGGD

SEQ ID NO: 1277 - protein, 1368 aa, Artificial sequence
  Synthetic sequence
MDKKYSIGLAIGTNSVGWAVITDEYKVPSKKFKVLGNTDRHSIKKNLIGALLFDSGETAEATRLKRTARRRYTRRKNRICYLQEIFSNEMAKVDDSFFHRLEESFLVEEDKKHERHPIFGNIVDEVAYHEKYPTIYHLRKKLVDSTDKADLRLIYLALAHMIKFRGHFLIEGDLNPDNSDVDKLFIQLVQTYNQLFEENPINASGVDAKAILSARLSKSRRLENLIAQLPGEKKNGLFGNLIALSLGLTPNFKSNFDLAEDAKLQLSKDTYDDDLDNLLAQIGDQYADLFLAAKNLSDAILLSDILRVNTEITKAPLSASMIKRYDEHHQDLTLLKALVRQQLPEKYKEIFFDQSKNGYAGYIDGGASQEEFYKFIKPILEKMDGTEELLVKLNREDLLRKQRTFDNGSIPHQIHLGELHAILRRQEDFYPFLKDNREKIEKILTFRIPYYVGPLARGNSRFAWMTRKSEETITPWNFEEVVDKGASAQSFIERMTNFDKNLPNEKVLPKHSLLYEYFTVYNELTKVKYVTEGMRKPAFLSGEQKKAIVDLLFKTNRKVTVKQLKEDYFKKIECFDSVEISGVEDRFNASLGTYHDLLKIIKDKDFLDNEENEDILEDIVLTLTLFEDREMIEERLKTYAHLFDDKVMKQLKRRRYTGWGRLSRKLINGIRDKQSGKTILDFLKSDGFANRNFMQLIHDDSLTFKEDIQKAQVSGQGDSLHEHIANLAGSPAIKKGILQTVKVVDELVKVMGRHKPENIVIEMARENQTTQKGQKNSRERMKRIEEGIKELGSQILKEHPVENTQLQNEKLYLYYLQNGRDMYVDQELDINRLSDYDVDHIVPQSFLADDSIDNKVLTRSDKNRGKSDNVPSEEVVKKMKNYWRQLLNAKLITQRKFDNLTKAERGGLSELDKAGFIKRQLVETRQITKHVAQILDSRMNTKYDENDKLIREVKVITLKSKLVSDFRKDFQFYKVREINNYHHAHDAYLNAVVGTALIKKYPALESEFVYGDYKVYDVRKMIAKSEQEIGKATAKYFFYSNIMNFFKTEITLANGEIRKAPLIETNGETGEIVWDKGRDFATVRKVLSMPQVNIVKKTEVQTGGFSKESILPKRNSDKLIARKKDWDPKKYGGFDSPTVAYSVLVVAKVEKGKSKKLKSVKELLGITIMERSSFEKNPIDFLEAKGYKEVKKDLIIKLPKYSLFELENGRKRMLASAGELQKGNELALPSKYVNFLYLASHYEKLKGSPEDNEQKQLFVEQHKHYLDEIIEQISEFSKRVILADANLDKVLSAYNKHRDKPIREQAENIIHLFTLTNLGAPAAFKYFDTTIDRKRYTSTKEVLDATLIHQSITGLYETRIDLSQLGGD

SEQ ID NO: 1278 - protein, 1367 aa, Artificial sequence
  Synthetic sequence
DKKYSIGLAIGTNSVGWAVITDEYKVPSKKFKVLGNTDRHSIKKNLIGALLFDSGETAEATRLKRTARRRYTRRKNRICYLQEIFSNEMAKVDDSFFHRLEESFLVEEDKKHERHPIFGNIVDEVAYHEKYPTIYHLRKKLVDSTDKADLRLIYLALAHMIKFRGHFLIEGDLNPDNSDVDKLFIQLVQTYNQLFEENPINASGVDAKAILSARLSKSRRLENLIAQLPGEKKNGLFGNLIALSLGLTPNFKSNFDLAEDAKLQLSKDTYDDDLDNLLAQIGDQYADLFLAAKNLSDAILLSDILRVNTEITKAPLSASMIKRYDEHHQDLTLLKALVRQQLPEKYKEIFFDQSKNGYAGYIDGGASQEEFYKFIKPILEKMDGTEELLVKLNREDLLRKQRTFDNGSIPHQIHLGELHAILRRQEDFYPFLKDNREKIEKILTFRIPYYVGPLARGNSRFAWMTRKSEETITPWNFEEVVDKGASAQSFIERMTAFDKNLPNEKVLPKHSLLYEYFTVYNELTKVKYVTEGMRKPAFLSGEQKKAIVDLLFKTNRKVTVKQLKEDYFKKIECFDSVEISGVEDRFNASLGTYHDLLKIIKDKDFLDNEENEDILEDIVLTLTLFEDREMIEERLKTYAHLFDDKVMKQLKRRRYTGWGALSRKLINGIRDKQSGKTILDFLKSDGFANRNFMALIHDDSLTFKEDIQKAQVSGQGDSLHEHIANLAGSPAIKKGILQTVKVVDELVKVMGRHKPENIVIEMARENQTTQKGQKNSRERMKRIEEGIKELGSQILKEHPVENTQLQNEKLYLYYLQNGRDMYVDQELDINRLSDYDVDHIVPQSFLKDDSIDNKVLTRSDKNRGKSDNVPSEEVVKKMKNYWRQLLNAKLITQRKFDNLTKAERGGLSELDKAGFIKRQLVETRAITKHVAQILDSRMNTKYDENDKLIREVKVITLKSKLVSDFRKDFQFYKVREINNYHHAHDAYLNAVVGTALIKKYPKLESEFVYGDYKVYDVRKMIAKSEQEIGKATAKYFFYSNIMNFFKTEITLANGEIRKRPLIETNGETGEIVWDKGRDFATVRKVLSMPQVNIVKKTEVQTGGFSKESILPKRNSDKLIARKKDWDPKKYGGFDSPTVAYSVLVVAKVEKGKSKKLKSVKELLGITIMERSSFEKNPIDFLEAKGYKEVKKDLIIKLPKYSLFELENGRKRMLASAGELQKGNELALPSKYVNFLYLASHYEKLKGSPEDNEQKQLFVEQHKHYLDEIIEQISEFSKRVILADANLDKVLSAYNKHRDKPIREQAENIIHLFTLTNLGAPAAFKYFDTTIDRKRYTSTKEVLDATLIHQSITGLYETRIDLSQLGGD

SEQ ID NO: 1279 - protein, 1053 aa, Staphylococcus aureus; identical to SEQ ID NO: 249

SEQ ID NO: 1280 - protein, 1300 aa, Francisella tularensis; identical to SEQ ID NO: 818

SEQ ID NO: 1281 - protein, 1306 aa, Acidaminococcus
TQFEGFTNLYQVSKTLRFELIPQGKTLKHIQEQGFIEEDKARNDHYKELKPIIDRIYKTYADQCLQLVQLDWENLSAAIDSYRKEKTEETRNALIEEQATYRNAIHDYFIGRTDNLTDAINKRHAEIYKGLFKAELFNGKVLKQLGTVTTTEHENALLRSFDKFTTYFSGFYENRKNVFSAEDISTAIPHRIVQDNFPKFKENCHIFTRLITAVPSLREHFENVKKAIGIFVSTSIEEVFSFPFYNQLLTQTQIDLYNQLLGGISREAGTEKIKGLNEVLNLAIQKNDETAHIIASLPHRFIPLFKQILSDRNTLSFILEEFKSDEEVIQSFCKYKTLLRNENVLETAEALFNELNSIDLTHIFISHKKLETISSALCDHWDTLRNALYERRISELTGKITKSAKEKVQRSLKHEDINLQEIISAAGKELSEAFKQKTSEILSHAHAALDQPLPTTLKKQEEKEILKSQLDSLLGLYHLLDWFAVDESNEVDPEFSARLTGIKLEMEPSLSFYNKARNYATKKPYSVEKFKLNFQMPTLASGWDVNKEKNNGAILFVKNGLYYLGIMPKQKGRYKALSFEPTEKTSEGFDKMYYDYFPDAAKMIPKCSTQLKAVTAHFQTHTTPILLSNNFIEPLEITKEIYDLNNPEKEPKKFQTAYAKKTGDQKGYREALCKWIDFTRDFLSKYTKTTSIDLSSLRPSSQYKDLGEYYAELNPLLYHISFQRIAEKEIMDAVETGKLYLFQIYNKDFAKGHHGKPNLHTLYWTGLFSPENLAKTSIKLNGQAELFYRPKSRMKRMAHRLGEKMLNKKLKDQKTPIPDTLYQELYDYVNHRLSHDLSDEARALLPNVITKEVSHEIIKDRRFTSDKFFFHVPITLNYQAANSPSKFNQRVNAYLKEHPETPIIGIDRGERNLIYITVIDSTGKILEQRSLNTIQQFDYQKKLDNREKERVAARQAWSVVGTIKDLKQGYLSQVIHEIVDLMIHYQAVVVLENLNFGFKSKRTGIAEKAVYQQFEKMLIDKLNCLVLKDYPAEKVGGVLNPYQLTDQFTSFAKMGTQSGFLFYVPAPYTSKIDPLTGFVDPFVWKTIKNHESRKHFLEGFDFLHYDVKTGDFILHFKMNRNLSFQRGLPGFMPAWDIVFEKNETQFDAKGTPFIAGKRIVPVIENHRFTGRYRDLYPANELIALLEEKGIVFRDGSNILPKLLENDDSHAIDTMVALIRSVLQMRNSNAATGEDYINSPVRDLNGVCFDSRFQNPEWPMDADANGAYHIALKGQLLLNHLKESKDLKLQNGISNQDWLAYIQELRN

SEQ ID NO: 1282 - protein, 1306 aa, Artificial sequence
  Synthetic sequence
TQFEGFTNLYQVSKTLRFELIPQGKTLKHIQEQGFIEEDKARNDHYKELKPIIDRIYKTYADQCLQLVQLDWENLSAAIDSYRKEKTEETRNALIEEQATYRNAIHDYFIGRTDNLTDAINKRHAEIYKGLFKAELFNGKVLKQLGTVTTTEHENALLRSFDKFTTYFSGFYENRKNVFSAEDISTAIPHRIVQDNFPKFKENCHIFTRLITAVPSLREHFENVKKAIGIFVSTSIEEVFSFPFYNQLLTQTQIDLYNQLLGGISREAGTEKIKGLNEVLNLAIQKNDETAHIIASLPHRFIPLFKQILSDRNTLSFILEEFKSDEEVIQSFCKYKTLLRNENVLETAEALFNELNSIDLTHIFISHKKLETISSALCDHWDTLRNALYERRISELTGKITKSAKEKVQRSLKHEDINLQEIISAAGKELSEAFKQKTSEILSHAHAALDQPLPTTLKKQEEKEILKSQLDSLLGLYHLLDWFAVDESNEVDPEFSARLTGIKLEMEPSLSFYNKARNYATKKPYSVEKFKLNFQMPTLASGWDVNKEKNNGAILFVKNGLYYLGIMPKQKGRYKALSFEPTEKTSEGFDKMYYDYFPDAAKMIPKCSTQLKAVTAHFQTHTTPILLSNNFIEPLEITKEIYDLNNPEKEPKKFQTAYAKKTGDQKGYREALCKWIDFTRDFLSKYTKTTSIDLSSLRPSSQYKDLGEYYAELNPLLYHISFQRIAEKEIMDAVETGKLYLFQIYNKDFAKGHHGKPNLHTLYWTGLFSPENLAKTSIKLNGQAELFYRPKSRMKRMAHRLGEKMLNKKLKDQKTPIPDTLYQELYDYVNHRLSHDLSDEARALLPNVITKEVSHEIIKDRRFTSDKFFFHVPITLNYQAANSPSKFNQRVNAYLKEHPETPIIGIDRGERNLIYITVIDSTGKILEQRSLNTIQQFDYQKKLDNREKERVAARQAWSVVGTIKDLKQGYLSQVIHEIVDLMIHYQAVVVLENLNFGFKSKRTGIAEKAVYQQFEKMLIDKLNCLVLKDYPAEKVGGVLNPYQLTDQFTSFAKMGTQSGFLFYVPAPYTSKIDPLTGFVDPFVWKTIKNHESRKHFLEGFDFLHYDVKTGDFILHFKMNRNLSFQRGLPGFMPAWDIVFEKNETQFDAKGTPFIAGKRIVPVIENHRFTGRYRDLYPANELIALLEEKGIVFRDGSNILPKLLENDDSHAIDTMVALIRSVLQMANSNAATGEDYINSPVRDLNGVCFDSRFQNPEWPMDADANGAYHIALKGQLLLNHLKESKDLKLQNGISNQDWLAYIQELRN
